United States Patent Application Publication US 2024/0068045 A1 - sequence listing, part 3

SEQ ID NO: 9955 - DNA, 201 bp, synthetic construct
  misc_feature 1..201: note = Description of Artificial Sequence: Synthetic polynucleotide
  source 1..201: mol_type = other DNA
ggggttgggaygtttyggyggagtaggyggyggyggtggygagttggggagttttaggttyggygttgtyggaggggttygagtygagtygtttgygtttyggtygggtagygtygggttygtttttygyggggttaygttttgttaaattttgttgyggyggttagygtagygggttygtaagygggygggaggggygtc

SEQ ID NO: 9956 - DNA, 201 bp, synthetic construct
  misc_feature 1..201: note = Description of Artificial Sequence: Synthetic polynucleotide
  source 1..201: mol_type = other DNA
ttattggtgagtttggtagggtatagagaggatggtattattagttggagggggataggttttaattatgagtttaggatgtagagagyggtagggattatyggagttttttyggttttggtgttttggttttttttgtatayggtttttatatgaygtttagtaagtyggattttaatttgtttatttattttttatttt

SEQ ID NO: 9957 - DNA, 201 bp, synthetic construct
  misc_feature 1..201: note = Description of Artificial Sequence: Synthetic polynucleotide
  source 1..201: mol_type = other DNA
gaggttaaggygggtagattattygaggttaggagttagagattagttyggttaatagggygaaatttygttttttttaaaaatataaaaattagttaggygtggyggygttygttygtaattttaggtatttggtaggtygaggtaggagaattaygggagttyggggtagggaggttgtagtgattygagattayggta

SEQ ID NO: 9958 - DNA, 233 bp, synthetic construct
  misc_feature 1..233: note = Description of Artificial Sequence: Synthetic polynucleotide
  source 1..233: mol_type = other DNA
ggagagagagagagagagagagagayggagtyggagagggagggagygagagaaagygagagtttttygttatttttygtygtttttagaatttatygggygtttgttyggyggttttagaaggtygggttgygttgtgggttgyggggagtyggaggttttttgattggttttttgaygttttyggattaattgtgttgttgtataggygtggtttttataggtygagtgtt

SEQ ID NO: 9959 - DNA, 201 bp, synthetic construct
  misc_feature 1..201: note = Description of Artificial Sequence: Synthetic polynucleotide
  source 1..201: mol_type = other DNA
ygyggtatagttatttttttygtygaggyggtattttaattttgtgtttttttaggatygygggttgtaggtattyggttttygaagyggaggtyggagtygygyggagaagttaayggtaatgaygttttttgtygatttttaggaggggataggttgagggtttggaygaggtyggaagygtttttattgtagtttygg

SEQ ID NO: 9960 - DNA, 201 bp, synthetic construct
  misc_feature 1..201: note = Description of Artificial Sequence: Synthetic polynucleotide
  source 1..201: mol_type = other DNA
ttttgagaagtagtagtagttggtttgtttgttgtttygttttygtgtatggttgtttagygttggttttagtgtttagygttttygtttagtattttttyggttttttttttttatttttygttttygagttgyggggagttttagtttgggatttttgttttatgtttttgggtttttgttttggttggttygtttttt

SEQ ID NO: 9961 - DNA, 201 bp, synthetic construct
  misc_feature 1..201: note = Description of Artificial Sequence: Synthetic polynucleotide
  source 1..201: mol_type = other DNA
ggtttygtygggtyggtygttgygagtttygtttyggtttyggttatygtyggggaggaygaygaygaygtggtgggggaygtgttggtattgttggtygygtttttggtttyggggtygygggygtygygygtggaggtygtttttttttgtygtttgygtygggaygygttggtggagyggygygygttgtaygagttt

SEQ ID NO: 9962 - DNA, 201 bp, synthetic construct
  misc_feature 1..201: note = Description of Artificial Sequence: Synthetic polynucleotide
  source 1..201: mol_type = other DNA
ttttttttagtatattttatgtaaaagttagtaaaaatattttttttataagtttaaataaatgtttaaaaatatgtaagttaggaagttatttttaataygtatattttttttatatgtagaagtaatggtgagaattttttatattttttgtagtagattttyggtttyggggttgggtttttagtaagtttatttttg

SEQ ID NO: 9963 - DNA, 201 bp, synthetic construct
  misc_feature 1..201: note = Description of Artificial Sequence: Synthetic polynucleotide
  source 1..201: mol_type = other DNA
ttyggtygtattttygttttatttttayggtagggtttttagtgtttgattaagtttaagttygagtttttyggygygttgtttatyggttgttttttygygttttttttttttttttattygtatygtttygttttttattttttttttgttttttttttattatttagtttatatttttttygttttttttttygtttt

SEQ ID NO: 9964 - DNA, 201 bp, synthetic construct
  misc_feature 1..201: note = Description of Artificial Sequence: Synthetic polynucleotide
  source 1..201: mol_type = other DNA
gggattgggaaygggatagggaygygttttaatttatttagyggtggagttggggggyggygyggttaygtgggatggygggtagtttaggggattygggygayggggtttggygggtagggttgttttagtygtttttataaagtyggttttttygatttttttttttttttgtagtttttttttttttttttgggggtt

SEQ ID NO: 9965 - DNA, 201 bp, synthetic construct
  misc_feature 1..201: note = Description of Artificial Sequence: Synthetic polynucleotide
  source 1..201: mol_type = other DNA
tagttatttatttgttttttaygttttatttattagygygtayggtttyggtaattttattyggagyggggygtygtygtygtttttgtygtagttyggtygggtygttgggygtaggggatttygygtygtygttgtygttgtygtygtygtygtygtygttgtygttgttgtatttttyggygagygttgttgtttttt

SEQ ID NO: 9966 - DNA, 201 bp, synthetic construct
  misc_feature 1..201: note = Description of Artificial Sequence: Synthetic polynucleotide
  source 1..201: mol_type = other DNA
tttgggggaygtyggaygttatgttgtggaaaataatygataatgttaagtaygaagaggattgygaggtgagttggggtttyggggtgtagtttygtttygtygaggatagttygggaggtaggggttattggatygaggtyggggaygagggtataggagttttggtttttyggtgggaygggatttattttttyggat

SEQ ID NO: 9967 - DNA, 201 bp, synthetic construct
  misc_feature 1..201: note = Description of Artificial Sequence: Synthetic polynucleotide
  source 1..201: mol_type = other DNA
gggagggaagaaggaggyggygagygggaagaggaagaagaygtaggtagygttaggygagtttaggggygtygggagygyggagttygggttayggattygygggagtttattgygttttygggttttggagggttgtttttgttygtaggttygggygttttygttaggaggygatagygttatgtttttttaggtttt

SEQ ID NO: 9968 - DNA, 201 bp, synthetic construct
  misc_feature 1..201: note = Description of Artificial Sequence: Synthetic polynucleotide
  source 1..201: mol_type = other DNA
tttagtyggtttttygtatgattggattatatgagggatttaagttyggttagttgttatttttyggattatatgygtgtttagggatygttttttaattyggtatggggatttggaaaaaaagattagggtagagggattggggtygggttyggtgatygtttttyggtaattaaaggatagtaaaggayggtttttgat

SEQ ID NO: 9969 - DNA, 410 bp, synthetic construct
  misc_feature 1..410: note = Description of Artificial Sequence: Synthetic polynucleotide
  source 1..410: mol_type = other DNA
ygtatgygtttaggtyggttygtaggtttttttygttttagtyggtagttagttygttygygttggggttatygygagtyggttygtagyggggttatygygattttyggygtagatatagaggtygtttttagtttygtygtttygtggtttygttttygttgtaygtttttttatttttyggatttygtagggtygyggyggatayggttygatyggggaygtgaaygygtagaattatattttttagygtttygttygygttggaattatatttttyggggggttyggyggtgtattygtyggggtygyggattggaggttttyggttggaaaagttttttggyggttaattggggaggattggaagaaatttaggatggagttagtattgttggtttaatatgttt

SEQ ID NO: 9970 - DNA, 201 bp, synthetic construct
  misc_feature 1..201: note = Description of Artificial Sequence: Synthetic polynucleotide
  source 1..201: mol_type = other DNA
aagtttttgggaaagattygttttattttyggaagttagagggygttagttgtygggttgaaaaggggtgtggggaggggaagtagttttatttygggttyggagtttgtaggagagagaagtggggagtaagaagtgaattttaggggtttatagggttttygtagatgtttaggtyggttaggaatgtatttttggttt

SEQ ID NO: 9971 - DNA, 201 bp, synthetic construct
  misc_feature 1..201: note = Description of Artificial Sequence: Synthetic polynucleotide
  source 1..201: mol_type = other DNA
tttattaygtyggggygattygttgtttgagygagtaygtttygtatttttttygygaygygygtatgttgttyggygtttyggtyggggygttgtattgygtyggygtttttttyggtatttygttgggtgygtttggggaygttgttygggttttaygtgyggagtgggtgttttttaggtyggggagygggggatttt

SEQ ID NO: 9972 - DNA, 201 bp, synthetic construct
  misc_feature 1..201: note = Description of Artificial Sequence: Synthetic polynucleotide
  source 1..201: mol_type = other DNA
atttttggattaggaaatagtgtgtgtgtataygagagagagggatagagagaggggggatatgtggagtgtattggaattattataatttttatgaaggyggtatyggagttattggtattatttgtgtaatttttttttatgtttgaygtygttttaaaataaagagtgagttgagtaaattaattyggtagggtatat

SEQ ID NO: 9973 - DNA, 201 bp, synthetic construct
  misc_feature 1..201: note = Description of Artificial Sequence: Synthetic polynucleotide
  source 1..201: mol_type = other DNA
gyggyggggttgggtttggggttggaygttgatttaggatttygtttttgttygttttgygtygygtttttttygggtyggttttgatygagtagttttaygygggttyggggttygtttattygataggagyggggggttgtagtttaygagtttaygagttygtagygaygtattyggagtgtaatttygtagagttac

SEQ ID NO: 9974 - DNA, 201 bp, synthetic construct
  misc_feature 1..201: note = Description of Artificial Sequence: Synthetic polynucleotide
  source 1..201: mol_type = other DNA
gtatygygyggyggygtttggygggtattgttgttygyggagggayggtgggggggttttagtagttggygggggtggagggggygggagagggagtttgygtygggttgagtttggaggtgyggggygggttyggggagygtttttggggttttttttgttatagtyggggyggttggaatttttttttttttttttttt

SEQ ID NO: 9975 - DNA, 201 bp, synthetic construct
  misc_feature 1..201: note = Description of Artificial Sequence: Synthetic polynucleotide
  source 1..201: mol_type = other DNA
gtygygtygtygggtttyggggatatttttygtygtttttttygattygygtygtyggggtygtygggtygtagggtayggggtyggygyggggggggagyggagaggggttggggagttttaggggttyggggttygttygygggggatgggtagggatttygggtygygtggggtgygggggtygttygtattgaggac

SEQ ID NO: 9976 - DNA, 201 bp, synthetic construct
  misc_feature 1..201: note = Description of Artificial Sequence: Synthetic polynucleotide
  source 1..201: mol_type = other DNA
tttttttttaaaaagagttttttagagttgtygaaattttygyggggtgaaagttaaatttttggagtygttgtgtagtygggtagaggatayggyggygygagtyggaaagataagtgtttaggygaatgggaaaggaaagattttaatttttgtttttattgttagttgaatgtttataaaaattaaagggaatgyggg

SEQ ID NO: 9977 - DNA, 201 bp, synthetic construct
  misc_feature 1..201: note = Description of Artificial Sequence: Synthetic polynucleotide
  source 1..201: mol_type = other DNA
atggtttattgygtaagtttatatttagttttaggaagygagttttaygtygttttagttttgtatttatagtygttaagyggtttyggaagtygaatgtyggataggttaaagatagygtygttgtttyggtattgtygttagagggygyggagtygtygtgttggtttgtattttttttgttaygttagtygaayggtt

SEQ ID NO: 9978 - DNA, 201 bp, synthetic construct
  misc_feature 1..201: note = Description of Artificial Sequence: Synthetic polynucleotide
  source 1..201: mol_type = other DNA
gyggttyggaaatgagygtttttyggggatagggggttttgyggggyggygatagttggatttttagygygtataaagtttgygggaggatttattgtagyggtygttttttttygtttagygagggygggygtaggggygggggatgtygaagggttaggtttgtttaggtygygttattttygttttagaygtttagtt

SEQ ID NO: 9979 - DNA, 201 bp, synthetic construct
  misc_feature 1..201: note = Description of Artificial Sequence: Synthetic polynucleotide
  source 1..201: mol_type = other DNA
tttygagggtygygygggtttaggygtttayggtttygtagygtygygtttttygygagaaygtagagattygggttygttttgagtygtygattgygggygggagtyggygggtaaggygygyggtyggtagtyggagyggygygtaaygtagttgagtgaggtygtyggtggaggtayggagtagtaggygttyggggc

SEQ ID NO: 9980 - DNA, 294 bp, synthetic construct
  misc_feature 1..294: note = Description of Artificial Sequence: Synthetic polynucleotide
  source 1..294: mol_type = other DNA
tttygygaaggtttyggttyggtygggyggggtggggyggtttyggttttattaattagyggtttgttgtggatgtyggyggaggagatgttatttagggygggaaaaggggygyggaagaggggyggggygggttayggygygtagggtttttttttttygtttyggatttaattaattgggtttgagtttttgtyggggagggggygtygggyggggtygyggttgggyggggygggggatygggatyggyggygggggttgyggttttgtagtggaagtatgggyggygag

SEQ ID NO: 9981 - DNA, 201 bp, synthetic construct
  misc_feature 1..201: note = Description of Artificial Sequence: Synthetic polynucleotide
  source 1..201: mol_type = other DNA
gtgtggaggtttaygtagygtttttggttggaayggggaagtttgtatttagttttgggagtgggtttgggagagggaggaggagtygtygggagtttggygggagggyggtgttttygtttgggtttttttttgttgttttagtttyggtagtttttatagtagtttygaagggtgagaatttgtttttttatggatttg

SEQ ID NO: 9982 - DNA, 201 bp, synthetic construct
  misc_feature 1..201: note = Description of Artificial Sequence: Synthetic polynucleotide
  source 1..201: mol_type = other DNA
ttttttagtttttagagtaagttaattagggataygttttygtggtttagttyggaaataatgtttggtgggaatttgtaattttggttgtyggaattttyggggaggattaaygtyggygtatygtgyggtyggggyggggygtygtttaaatttaggttttgtgatagygattgtggyggtttggaaagygtgggtttc

SEQ ID NO: 9983 - DNA, 201 bp, synthetic construct
  misc_feature 1..201: note = Description of Artificial Sequence: Synthetic polynucleotide
  source 1..201: mol_type = other DNA
aattatttttaaaataattttttyggggggtgagaggtaattataattttagygagtggagggygygggggatgggygtygggygggygggggyggggagygyggygygggtttttaggtggygagyggaggtgttttygtygyggggggaggggygggggygtaygyggtyggyggyggggggaggyggygygyggggga

SEQ ID NO: 9984 - DNA, 201 bp, synthetic construct
  misc_feature 1..201: note = Description of Artificial Sequence: Synthetic polynucleotide
  source 1..201: mol_type = other DNA
aggttttygtatttatygygtgggtttttgttttggttttatttgttttygatatttttygttttygygatgtttaatttyggttygagaaggttggtygygatttygttyggtattygtygtttygatattattattygttttttygatttttttyggygtygttgtttattygtttttygtttygtttatyggggtygt

SEQ ID NO: 9985 - DNA, 201 bp, synthetic construct
  misc_feature 1..201: note = Description of Artificial Sequence: Synthetic polynucleotide
  source 1..201: mol_type = other DNA
ggggaygttygtttttttttygggtagttttttttatttaggygggatttgggttttygttggatttagggtygttttttygtaggyggggtyggttyggygygtattttgtttyggatgttttggygtayggtttygygtttygtttttattttggygtatttggttttgygtttttttttygtttggygtagygttttt

SEQ ID NO: 9986 - DNA, 201 bp, synthetic construct
  misc_feature 1..201: note = Description of Artificial Sequence: Synthetic polynucleotide
  source 1..201: mol_type = other DNA
tattttttttttgygygtttgtttttttttygtttgtaggatttygtttttggttygttttttttttttttgttgggtaggttttttyggagtttattttyggyggyggyggyggtagtygyggtygyggtygttggatttygagaggygyggggaatttttttattttttgttttggttttatttgtttttttttttttt

SEQ ID NO: 9987 - DNA, 201 bp, synthetic construct
  misc_feature 1..201: note = Description of Artificial Sequence: Synthetic polynucleotide
  source 1..201: mol_type = other DNA
tagggaattataaaagayggtyggyggygagtaggttggggtgayggggatttygtggataaygggtttgaggaygtttagggttttagttttttttaggygtttttygtyggggtaaygtagagtagttgtygtttttttygygttttagtagatggtggtgttagttyggtttygtgttyggtygtygttgygttygyg

SEQ ID NO: 9988 - DNA, 201 bp, synthetic construct
  misc_feature 1..201: note = Description of Artificial Sequence: Synthetic polynucleotide
  source 1..201: mol_type = other DNA
ttagataggtatggttaaggtagtttgtgatttattttataaaattagagatttttgttttttgtggagtaagatttttyggaggttagagtaggatgatygttaatttttttttttagagtyggtttagtttgataaagtaggggttatttyggagtttggaggggaagagagtttaggtataaggttatttttgggaaa

SEQ ID NO: 9989 - DNA, 201 bp, synthetic construct
  misc_feature 1..201: note = Description of Artificial Sequence: Synthetic polynucleotide
  source 1..201: mol_type = other DNA
gggygygyggygttttttatttaygttyggtyggggygyggygyggyggygggtattyggayggtyggyggaggtaggtyggttygggtattagtttgggyggttygygggtyggggyggyggyggggtggyggtggyggyggtagtagygyggagtyggtgggygtagtygygygttaggtyggyggtyggggtttgggg

SEQ ID NO: 9990 - DNA, 201 bp, synthetic construct
  misc_feature 1..201: note = Description of Artificial Sequence: Synthetic polynucleotide
  source 1..201: mol_type = other DNA
tttgttatagataagttttygaagtygttttggtgtaggttatttggttttttagtttttggtgtgtggttagtgtttggtgtttttggaaagttattttygggtagtttttgatagtgygattyggygtttaagtagtttgggattttgygyggatttgatttttttagatygtaggtagtttgggaggaggttyggtyg

SEQ ID NO: 9991 - DNA, 463 bp, synthetic construct
  misc_feature 1..463: note = Description of Artificial Sequence: Synthetic polynucleotide
  source 1..463: mol_type = other DNA
aygtttgtgttgtatttggygttggtygayggygyggtgttgttgtttaygtygttttttgtggtttttttgattyggtaggtttggtygttgggttaggygggttgtaaggyggtgtattaygtgtgygygtttagtatgtaygttagygtgttgtttatyggtttgtttagtttgtagygttgtttygtagttattygtttttttttggygtttyggttgygtagttyggttttggttygtygtttgttgttggyggtttggttggtygttttgttgttygtygtttyggtygtygtttatygttatttgtggagggatygygtatgttagttgtgttattygtygtyggtttaygtygtygtttatttgagtttggagattttgatygttttygtgttttttttygggttgatgttyggttgttatagygtgaygttggtayggttgyggggygttygtt

SEQ ID NO: 9992 - DNA, 201 bp, synthetic construct
  misc_feature 1..201: note = Description of Artificial Sequence: Synthetic polynucleotide
  source 1..201: mol_type = other DNA
atygggagtgtttagygattttaggttagttygggggaaagaagyggtygtygtygtygaggttttttggtttygggatttyggygttgtttttttttttygtatttgttggggtgggttggagtygtaatygaatttyggtygyggygtttgtaaagtttttttttygaagtttygyggttttagtttattggygttttt

SEQ ID NO: 9993 - DNA, 201 bp, synthetic construct
  misc_feature 1..201: note = Description of Artificial Sequence: Synthetic polynucleotide
  source 1..201: mol_type = other DNA
gttttatagtttyggttagaatttggtgggggaygyggggggggggtgtttgayggggagggggtatagttttttygggttaatttttatatttttgtttygtttaggyggggggtgagtyggggtgagtagtyggttttaagttggtyggttttttggaaagggagggttagtaggagaattgtagatttttttagtttt

SEQ ID NO: 9994 - DNA, 201 bp, synthetic construct
  misc_feature 1..201: note = Description of Artificial Sequence: Synthetic polynucleotide
  source 1..201: mol_type = other DNA
gggatygttttaagtagttygttaataaygtggyggtggtgaaggagttygayggygttaagttygtggtgttgaggaagaagtttyggttttyggagttygagttygtatttttyggtttttygggggtagyggtttagtygtygaaatttatttygayggttttgtygyggagygtttttgtttygggagtttygtttt

SEQ ID NO: 9995 - DNA, 201 bp, synthetic construct
  misc_feature 1..201: note = Description of Artificial Sequence: Synthetic polynucleotide
  source 1..201: mol_type = other DNA
gtttttagaggtttagttttgttttttattatatatagttattattttattygtttttggggttyggttgtttttttyggtgttttttaaatttttttttygatttgggtgttaagtttatttatttttyggygtygttttyggtygaatagttttttgtttttttttygtttgggtyggagtttttygtagtttttttyg

SEQ ID NO: 9996 - DNA, 201 bp, synthetic construct
  misc_feature 1..201: note = Description of Artificial Sequence: Synthetic polynucleotide
  source 1..201: mol_type = other DNA
ggttyggtttggggttgggttggggagygyggyggttgyggttggggtayggggyggtygggtgagttggtyggygttygttttttttatttagtgagtayggtagatatyggagaygyggggtttattttttyggttttttttygattaagaaaygttaatttygttttttattggttgygtygygygttatgtygatta

SEQ ID NO: 9997 - DNA, 201 bp, synthetic construct
  misc_feature 1..201: note = Description of Artificial Sequence: Synthetic polynucleotide
  source 1..201: mol_type = other DNA
atygagtttaaaagtygtyggyggtatattttagyggttttttttttttygggttgggattygtttttgtaagaaaygttatgtttttttttttagatatygtttygggagttttagatgtaaaattagaggttttttatttggtattattgatttttgtgttaataaaatgttagtttttaagggaaaatttaaaaaaag

SEQ ID NO: 9998 - DNA, 201 bp, synthetic construct
  misc_feature 1..201: note = Description of Artificial Sequence: Synthetic polynucleotide
  source 1..201: mol_type = other DNA
gtygygygggayggggtagggatttygagaatatyggggatttgygggtyggtggtttygggtaggttatttttgaygygggtgygaggtttttygygggygtgtayggttgggtyggagtygygtygggggtygggataygtttggggttagygttggygtygtygttygggtggggtgggtygggttygggtttagttt

SEQ ID NO: 9999 - DNA, 201 bp, synthetic construct
  misc_feature 1..201: note = Description of Artificial Sequence: Synthetic polynucleotide
  source 1..201: mol_type = other DNA
ggyggygygyggtagagttgggtttttygttaggtggtygggggtgtgtttttagggtattttattygttattttygygtttttagtttyggyggtygygyggatttygtttttgttgatttyggygtaygttttygygtygygygtagtttttygtttttygtygatttygtygygtygtyggtagttttttttagtttt

SEQ ID NO: 10000 - DNA, 201 bp, synthetic construct
  misc_feature 1..201: note = Description of Artificial Sequence: Synthetic polynucleotide
  source 1..201: mol_type = other DNA
ttttttttttgttgttttaaaatatttttygaygttagtaaaatataatgygtttyggtygtygtaaatagtygggagggagagtatatattyggygyggygyggtygtyggttyggtttttatttttttttygtttttagaaaatgttataaaagygggtagggygyggggagggyggttgygygttyggyggtyggggt

SEQ ID NO: 10001 - DNA, 201 bp, synthetic construct
  misc_feature 1..201: note = Description of Artificial Sequence: Synthetic polynucleotide
  source 1..201: mol_type = other DNA
agttaggaaatgyggggtttggtggggtgaggagtayggggttttttttttattttygyggggattttgttatyggtttagtgtggaggttttatygtttygttyggattygtggggtttygatagtgtggtttttgygaggattttttttatttttttygttttggggttgttgygggagggygttygggtagtattagg

SEQ ID NO: 10002 - DNA, 258 bp, synthetic construct
  misc_feature 1..258: note = Description of Artificial Sequence: Synthetic polynucleotide
  source 1..258: mol_type = other DNA
gyggyggtagyggyggtttggtttttttagagggttagagttagggatatgygggygttygggatttygygtttygygyggttyggygtttgagygttttygtttttygtttyggagttgtyggyggtatgattygataygtyggggygttygygygyggggattttayggggtaagttygggyggtygtttttttttttttygygatttttayggttygygttttggtygttttattttattttttgttttagagag

SEQ ID NO: 10003 - DNA, 201 bp, synthetic construct
  misc_feature 1..201: note = Description of Artificial Sequence: Synthetic polynucleotide
  source 1..201: mol_type = other DNA
tygayggttaaggaaagtttattagtttttygtatygtgggygaygggttaagattyggttttaaayggttagatttagtttttagtyggttgtygttttygttttaygtaggygygtttyggggttttttttttttttatygygygttygyggggttygaygggggyggagygattttyggaaggggygtggygatyggg

SEQ ID NO: 10004 - DNA, 201 bp, synthetic construct
  misc_feature 1..201: note = Description of Artificial Sequence: Synthetic polynucleotide
  source 1..201: mol_type = other DNA
agggggayggttagaygggatgtyggaagttaagggaygtagaggtyggygggtggyggygatggagaggatagattyggtttttagaggaggtygtgagygyggggtttgygtyggtyggaggagggattyggggggttgtaatatggttgttygggygtygttttttttttgttaagttagggttttggggagttgttg

SEQ ID NO: 10005 - DNA, 201 bp, synthetic construct
  misc_feature 1..201: note = Description of Artificial Sequence: Synthetic polynucleotide
  source 1..201: mol_type = other DNA
ttygtygygtttyggtygggatggatttataygttygatgagtttygygtyggyggttgygagygtygagtttttttttgttgyggttttagtygtttttygygygttyggtttygyggattaggatttttgggtttttyggttgagggygyggtygtttyggagaggtygagyggggaygggttygagatggygygggga

SEQ ID NO: 10006 - DNA, 201 bp, synthetic construct
  misc_feature 1..201: note = Description of Artificial Sequence: Synthetic polynucleotide
  source 1..201: mol_type = other DNA
tagttaggatagtataaaatttttttatygtttattttttgtaaaaaatygtggttttyggyggattttggagataggaggtgtaaagggygtttataygyggttygggttygyggtygagagttggggggatttggagyggggtygggtygtaagaagattttgattttgtttyggygttggggygygtgttaagggttc

SEQ ID NO: 10007 - DNA, 201 bp, synthetic construct
  misc_feature 1..201: note = Description of Artificial Sequence: Synthetic polynucleotide
  source 1..201: mol_type = other DNA
tgtygggttygaygtgtatagtttagygtttttttttattagttattgtttaggtttttygattttgtattygtyggaatgagagaaagtagtttttygtygtttagttttygggtagttgtttyggtygggttttgygttggtgagaaagttttatttagaggyggtygygygtaattgtaggyggygttttaggttygg

SEQ ID NO: 10008 - DNA, 201 bp, synthetic construct
  misc_feature 1..201: note = Description of Artificial Sequence: Synthetic polynucleotide
  source 1..201: mol_type = other DNA
ygygggtaaggaaagygygtaggttttgtagatttttttatttyggttttttggttyggttygttttttygtttyggggyggyggttttttgttttgtagygagygttygtaggagggaygttaggatttyggaygttatttttgaggtttttttgtatttgggtttttgatagtygggaataggtaggaggtggggygag

SEQ ID NO: 10009 - DNA, 201 bp, synthetic construct
  misc_feature 1..201: note = Description of Artificial Sequence: Synthetic polynucleotide
  source 1..201: mol_type = other DNA
gtgggaggtyggtagygygggygtygygttttyggaggagttygygttttttgaggagygygygtgttyggaagagttygyggygtygtttttygaatygygygtttggtttgaggatttygygtttttygaggagttyggggagttygygttygtattttyggggttyggggyggtgtayggggagtyggatttggtgtt

SEQ ID NO: 10010 - DNA, 201 bp, synthetic construct
  misc_feature 1..201: note = Description of Artificial Sequence: Synthetic polynucleotide
  source 1..201: mol_type = other DNA
agtgyggatttyggtygygtgyggttttgatygygtygttttatttttggyggggttaygtayggaygttatggttggygtygyggagtygggygatgygygyggattttttyggggttttgattgtttttgagttttttttgyggggggygtgygyggttygtttttygyggygttaygyggttttttttyggtygggga

SEQ ID NO: 10011 - DNA, 201 bp, synthetic construct
  misc_feature 1..201: note = Description of Artificial Sequence: Synthetic polynucleotide
  source 1..201: mol_type = other DNA
gtttgyggagggtgggattttatagtttgtttatttgtttaggttgagatttygtgttttagttttggatgttttaygggtttttygtttygggtagyggygtaygggaggagaagattttyggtttgtagttagatttttttttgagattttttttagtttaggtttagagttttgggatttttttygattttttttagt

SEQ ID NO: 10012 - DNA, 201 bp, synthetic construct
  misc_feature 1..201: note = Description of Artificial Sequence: Synthetic polynucleotide
  source 1..201: mol_type = other DNA
tyggttttttttttygyggggggtttygtttygygtttygttttttygggttgtagtyggtagtttaygtttagggagggtggagggaggaggagaggygyggagaggagggaggggagaggggagggaggaaggygagagaaagggagttgtttttatttyggattttttagagtttgtttggagygygtatttagyggt

SEQ ID NO: 10013 - DNA, 203 bp, synthetic construct
  misc_feature 1..203: note = Description of Artificial Sequence: Synthetic polynucleotide
  source 1..203: mol_type = other DNA
gygagyggttayggggtggggagtaaggggygygygggyggtaggtatggaayggaygyggygtatttygtttatygygggaygttyggayggyggtyggygygygyggttygtttygagttygagagggyggggagataatgtttgttyggyggggtagtttaggtygtaygttttygttygyggataygggtygtttttat

SEQ ID NO: 10014 - DNA, 201 bp, synthetic construct
  misc_feature 1..201: note = Description of Artificial Sequence: Synthetic polynucleotide
  source 1..201: mol_type = other DNA
tygtggagtygygttaggttayggggtttyggttagaygggagygttagtttttttttttgtttygatgtttttaaatttaggtttagttttttttttttygattygatgatatttttgggttttagaatgttgttgggggygggagatyggagaagaagtaggtgtayggggaggtgggtgttttgttttttgygaggag

SEQ ID NO: 10015 - DNA, 201 bp, synthetic construct
  misc_feature 1..201: note = Description of Artificial Sequence: Synthetic polynucleotide
  source 1..201: mol_type = other DNA
tttgggggggygggtyggatttgaaggttataggtttttttttgygtttattttttttgtaatttttatagtttttttygtygatttttttatgttttttygtttttttgttyggygttttttttyggtygygggttaattggttgtgatagttggagttttgggtagttgagyggtgttattgtaaattaggtaggygtt

SEQ ID NO: 10016 - DNA, 201 bp, synthetic construct
  misc_feature 1..201: note = Description of Artificial Sequence: Synthetic polynucleotide
  source 1..201: mol_type = other DNA
ttggaagggygggggyggtgatagyggtaggggygggattyggaggyggggygtttgtttaygtygtttagtagyggagggaggygyggttttagtttygygtttaggagtygtataggygttyggggtygtagtaggagtttttttagggygtttagygttgtatttaygagtygygygtygttttygtttagtgygttt

SEQ ID NO: 10017 - DNA, 201 bp, synthetic construct
  misc_feature 1..201: note = Description of Artificial Sequence: Synthetic polynucleotide
  source 1..201: mol_type = other DNA
tygtatttygttygtttgttttttatyggttaggttttgtygggtygtygyggtttyggygttttattttttttygggttagyggggggttgggagggggygaggaggaagggggtttttttttttttttttyggagggggtygtagyggyggtttyggtttttttttttttttatattttttttygtttttttttatttg

SEQ ID NO: 10018 - DNA, 201 bp, synthetic construct
  misc_feature 1..201: note = Description of Artificial Sequence: Synthetic polynucleotide
  source 1..201: mol_type = other DNA
tyggagggagggggtaaaggaagaaaaagaaagygygttyggaaagtyggtttgggttttgttaattattttgaaggtaaagtatttgtatttttttygtygaggttggttggyggygtygygttggaggggaggaggttygggaggaggaggagaaagagtagygggaggattygggttgggaggggagygtagggttgg

SEQ ID NO: 10019 - DNA, 201 bp, synthetic construct
  misc_feature 1..201: note = Description of Artificial Sequence: Synthetic polynucleotide
  source 1..201: mol_type = other DNA
tygtyggggagtygtaaagtttgayggaagaggttgyggttttygygttttagtygtyggttttygagtygtagtygggygtttttttgaygtagtygygygttttgtyggttttattygtttygygtayggatggtttttaagtggttygtygttaggtyggtaaatygtttttttagttgttgtygggygtygttygyg

SEQ ID NO: 10020 - DNA, 201 bp, synthetic construct
  misc_feature 1..201: note = Description of Artificial Sequence: Synthetic polynucleotide
  source 1..201: mol_type = other DNA
gyggygggaygttatttgygatygggattatgaggagttgttagattygtggggtyggtaaygagagtagtygyggtatttgttgagaggaaagagggagyggttyggygyggttggggygyggtagaggtttgttygattttyggttatgttattgttttgygtgygyggtgagtgygyggattgaggyggggaggyggg

SEQ ID NO: 10021 - DNA, 201 bp, synthetic construct
  misc_feature 1..201: note = Description of Artificial Sequence: Synthetic polynucleotide
  source 1..201: mol_type = other DNA
gygttagatttttttattatatttttttattttaggygattygttttggtttygggtgtttttagtttgygygggtygtttttagttttyggtggatattygtttttagttygtygttttttgttyggttttgygttttttggaatttttgggtttttagttttygtygtttttagaattgygtttgygtaataatggtta

SEQ ID NO: 10022 - DNA, 201 bp, synthetic construct
  misc_feature 1..201: note = Description of Artificial Sequence: Synthetic polynucleotide
  source 1..201: mol_type = other DNA
aattattagagaatttttttaaaaatatagattygatgaggagtggttttttygttttttttttgtgtygagaagggatttyggtygttaataataaagaygtttttygttttttttttttygtyggttygggttygtttttttygygttgyggttttyggtttagygtttttttttygagtygggttgyggygtttttaa

SEQ ID NO: 10023 - DNA, 201 bp, synthetic construct
  misc_feature 1..201: note = Description of Artificial Sequence: Synthetic polynucleotide
  source 1..201: mol_type = other DNA
ggagggtygyggagaygtaggygtttygggtygttygygttgtttttgtttgtttygtgygggagtyggggtttttggttttttggttttttggtttttgyggttygggygaatttagagygtattygtaygtyggtttyggtyggtttttagygttygggttttaygggtygygtttttaygyggygttttttagagatt

SEQ ID NO: 10024 - DNA, 523 bp, synthetic construct
  misc_feature 1..523: note = Description of Artificial Sequence: Synthetic polynucleotide
  source 1..523: mol_type = other DNA
ttgygttaagttttagaattatttagtttygtgtttgtygttyggggttyggtttygtttyggtyggygtttatttggyggtgtygttttyggaagattayggygaaggtttygtgttttaygagattttttttgttgtattygaagttatttattatttttatggtygygttttyggggtatatagyggaygggygggyggygtagtgyggygtaggtattagtatygyggtttygygggttyggagygygttagygtgyggygggtttggggtagtygtagtttygggttygggyggatttttatgtygagagatyggagyggaaattggggaagttgtygygyggagttagggttagygaggttyggttyggtttttgtygtttatggttyggtttgtygtyggtygttggttgtttggygaagyggtttyggygttgtygggttaggggtgtygttatygttattgtgygygtttagagtygtataygygttttgaggtagtgaggggttyggtatttt

SEQ ID NO: 10025 - DNA, 201 bp, synthetic construct
  misc_feature 1..201: note = Description of Artificial Sequence: Synthetic polynucleotide
  source 1..201: mol_type = other DNA
yggttygtattttttygtygttagttttagttttaaattyggyggtttagygggygtattatggtattggagtagygyggggagygygttyggagtttygyggttygttgygtttygttygggatttygttgygtygygygtttttttygyggttygyggggtygtttttgtatttttattttttttttygtttgtygtyg

SEQ ID NO: 10026 - DNA, 201 bp, synthetic construct
  misc_feature 1..201: note = Description of Artificial Sequence: Synthetic polynucleotide
  source 1..201: mol_type = other DNA
gttttygtttaagtgtggtttttttgggtttatattttattaggttagtaaggagggggatagyggggggyggggtaggtgttgggatttygggtaggtgyggggaaggtagggggyggggggggaaggggttgggygatgtaggtgttgggggtygggatagttgygggggtaggtaggtatygggaaggygggagggyg

SEQ ID NO: 10027 - DNA, 201 bp, synthetic construct
  misc_feature 1..201: note = Description of Artificial Sequence: Synthetic polynucleotide
  source 1..201: mol_type = other DNA
ygtagattttgggtttyggttttgttatttagggggattttttttaaygatgggatyggtgttyggagtggagtatggggagtgygttttygggagtyggygttggtyggatatgtgataattgtgggtygttggaggttygtttgygttgggatagggtttggattttaygtgygtygtttgtgtttygttagatygggg

SEQ ID NO: 10028 - DNA, 201 bp, synthetic construct
  misc_feature 1..201: note = Description of Artificial Sequence: Synthetic polynucleotide
  source 1..201: mol_type = other DNA
gggtyggtttygyggtygatttggggtatygygtyggggtgaggtttggygaggaggygaaggttgtaggygtgaggtgaaggtygtaggtyggtygggtygattttygttatgtaaatatyggtgagggggggggagggaygggggataagatggyggyggttyggygtttgttgtaggggaygatagagggggttgtyg

SEQ ID NO: 10029 - DNA, 201 bp, synthetic construct
  misc_feature 1..201: note = Description of Artificial Sequence: Synthetic polynucleotide
  source 1..201: mol_type = other DNA
ttttygygtttttttygygttttatatttatygttyggyggagggggtttagttygtagtygtygtygttatygtygygtttyggtttyggtgtaggtagyggtygtygtygtygagatagttgygygggygagtatttttaygtagtaagttygtttttttttygtttgtgygygygtgtgtgtttttygttygtyggyg

SEQ ID NO: 10030 - DNA, 201 bp, synthetic construct
  misc_feature 1..201: note = Description of Artificial Sequence: Synthetic polynucleotide
  source 1..201: mol_type = other DNA
gygggggttttttaygtggyggaggtttttyggtttgggggttaygggttyggaggaatttgtttggaagttttttattayggtagagttttttggagttygtttygtgttygataaggggagttttagatttgatttttttagtagtttygyggggyggggtygagaaggggygggygggyggaggaygttggygggaga

SEQ ID NO: 10031 - DNA, 201 bp, synthetic construct
  misc_feature 1..201: note = Description of Artificial Sequence: Synthetic polynucleotide
  source 1..201: mol_type = other DNA
aatgtgattatagttaatatatgatttttttagygttttagttagtgttttttttgatttttgttttttggagaggaggatggaagggaggggttyggtaygttgttggtattttgttgtgttttgtagttttttttygggatatttgggtttatatagttttttagtttatataattggtgtagattttttgtgtggaga

SEQ ID NO: 10032 - DNA, 301 bp, synthetic construct
  misc_feature 1..301: note = Description of Artificial Sequence: Synthetic polynucleotide
  source 1..301: mol_type = other DNA
tttttttttaatttttggyggygggyggttggggaagtagttttgtggtttttyggygggtgaggtygagatagagattaatttttaggyggygttttggygttgagttygygttgaataagattttttygtagttttgygtttygygtygggtgaaggggygtgtttttgtaggygttyggggttyggtttggagttggyggtyggtaygtygtttttggygttttttgttaattaagagaaatayggttaaatgagtgygttgggatagaaatttatagttaattaaggttttattygt

SEQ ID NO: 10033 - DNA, 223 bp, synthetic construct
  misc_feature 1..223: note = Description of Artificial Sequence: Synthetic polynucleotide
  source 1..223: mol_type = other DNA
gygggggyggyggyggtygtgagtttygatgaggttygagygttttyggtygygyggtagygttttyggttygatggagatttygtygtgggatttagttygtaaygattygttgtygtttaygttgatttyggtygtgtttttttaygtgaagtttggttttatygtygtttatatygtgttttaygygttgtttttygtgtttatttaygtgtagttttgg

SEQ ID NO: 10034 - DNA, 720 bp, synthetic construct
  misc_feature 1..720: note = Description of Artificial Sequence: Synthetic polynucleotide
  source 1..720: mol_type = other DNA
gatagtygtgttttattttygttttgtgttttttttttyggatagtgttttttttagggtttatttaggagggtgtagyggtggttttyggggyggtggtygtggtgggggtgttagttgtaggggtgttttyggtgggtgggagttggtggtttttygttggtgttatgggattygtatgttygttttgygtttttyggtttttgagtttataggtygggattttgtttgttagtygygtgygttgtygtttaatttttgtaggygtagagygygyggyggyggtgatagagaattttgtttggttgtttaaatatagttttttgtagaaggattttgygttyggggaaggggaggaatttttttttttttgggygttygtttttttygttatggttyggtttttatattygtttatatttggtygtagyggggygttyggggggaggggttgaggtygygtttttygtygttttttgggygygggttaggyggggaggaggggggygtttyggtygtgtgtttaggattgttttttagyggttattygggttttagttttttaggtttggttttgataggygggyggagtagttagtgygagatagggaggtyggtgygggtgygggaatttgattygttygggaggygggggyggggygggggygtagygygyggggaggggtyggygttygttttttttttttatttatttagttg

SEQ ID NO: 10035 - DNA, 1683 bp, synthetic construct
  misc_feature 1..1683: note = Description of Artificial Sequence: Synthetic polynucleotide
  source 1..1683: mol_type = other DNA
tagtggtagtgttgagtttaggaataygygyggagttygyggygattttygyggtygtttagttttygyggyggatttyggygygtaggagttattgggtygtaagggygtyggggagygggaggggygttgggggyggtaaggggttttagattttaggttaygaattgtttttttttttttygggtaagagtttygttttttttaattgatagaaatttattggggtaggggggygagtggggagagaggtygtttagggttygttattggttgygtttttttyggttttggtttgggaagyggttttgggtttttygggygagtagtttgggygtyggygttttttgygaggaagatygyggggtgayggtyggtattygttyggttgggtygygttgtygtttygatttatttttttttygygttygygtttttttttttttttttattaggagttygggattyggagagggygygggaggtaggtataygggttygattttattttagygtttatyggggaygygggygggyggygaygggaygyggygggggygyggggygggygyggttatggagtagtagyggyggyggyggyggyggyggyggtaatattagygatygygggyggaygagygggygggtagggtygtygggtttagyggatygaattgtatagtttagtaaaagygttttygtttttygygygtygttttttgygagtttaaatttattaatattttttaaygttttaatttattttttgaagaaaagtaaaaaaaaaaaaaaaaaaaaaaaaaaaagtaaaaaaagaaaaagtattgatyggagagayggggatatatatatatatatatatatatatatatatataaaattttttttggtttttgttaaaattagtagggttygtygygygtttgtgtgttagtgtgtgygagtgtgtgtgygtgygggygtgtgtgtgtgaatgtgattattttaggatttttygggtttyggagaygttatttttttttttgatatttttttttataaatyggtggygyggyggaggyggtagagtygggygggaagygyggggtyggtyggggygttygtygttygtygtygttttygygygttygggggtttyggygtttttygagttagggyggttagttygyggttygtygtttgatagatgtttatygttatggagttgtygtagtagtatttttgggggttygggygagygaygggagtygggatttgagygagygtyggggttagyggagtyggagtygtygggatatgggtgagtaygygyggygattttggttygggagttygggygtttagttttttttygygtygygggttttygtattttyggaatygggggygaygtgtgtgttttgtatgtaaaagtttaygtygttttgttgggtttttgattttgtattyggygggaagggggagatygggtygagggggygggatgtyggttygggygaggttgtaggagatgggygygatttyggygggtyggygggtgggyggygatgttggtttaattggagtggttygttggtggyggygatggtggaagttttgggttggagggttgggagtttattgagtttygtttaatttgatttatttttttttygtttttygttttttgtattttttttyggt

SEQ ID NO: 10036 - DNA, 233 bp, synthetic construct
  misc_feature 1..233: note = Description of Artificial Sequence: Synthetic polynucleotide
  source 1..233: mol_type = other DNA
tttygttygggtygttyggttyggttgtgttttgttyggttagggygggygggttygtttttttttyggtyggygttttttttttggtttttttttttttygygtygttygttttygtttttttygttttttyggygtyggygtagttttygtgaattygggygtattatttygggtgtttyggtttggggatygttgtygtttyggtygttgtttttttaatttttttgttt

SEQ ID NO: 10037 - DNA, 213 bp, synthetic construct
  misc_feature 1..213: note = Description of Artificial Sequence: Synthetic polynucleotide
  source 1..213: mol_type = other DNA
gattgygygtgygtagagtaygtyggygyggtttygggattttygygataattgtattgagataaagtgtggtaattygagttggttggtgatttattttyggygaggggttygygtgtgggttaygtygtygtttttatygggaaagyggggattagtggggggggtttagttgtagggtagtgggaggatgttgtttgttttgggggaagg

SEQ ID NO: 10038 - DNA, 236 bp, synthetic construct
  misc_feature 1..236: note = Description of Artificial Sequence: Synthetic polynucleotide
  source 1..236: mol_type = other DNA
ggtagygtygtttgygtygygtttagtaygaagagttygttttagtttaggygtagtagygttatttggtyggttatyggtagttyggggaagaagggygygtggygygtttattttayggtgttgaagagtagtygygtygttagttygtataygttgtygatgtttagtatygygttygtygygtygttttttgygtygaagygttyggtygtygtagggtagggtttagygyg

SEQ ID NO: 10039 - DNA, 233 bp, synthetic construct
  misc_feature 1..233: note = Description of Artificial Sequence: Synthetic polynucleotide
  source 1..233: mol_type = other DNA
gagggtggggttttaaaygttatttaattagygaygttgggttgggaattgtttaattaggtaygtagtttgagyggagaggayggttttygggatgtggygggatttgttygtttttttgtttttggttgtygttggaatttygggtttygtttttattgttttgtgttttttgtttttagaggtttagtttttggttttgtgatttgtaggtattgggaatttatagttaa

SEQ ID NO: 10040 - DNA, 737 bp, synthetic construct
  misc_feature 1..737: note = Description of Artificial Sequence: Synthetic polynucleotide
  source 1..737: mol_type = other DNA
aatgaygtygtaaataatagtattaattattatygttygtagttttygygtatagaggttttaggttttyggttttaygtggatygatttygttyggtagygyggggttattttatygygagtttttttygtagttyggttygggttatttygattygttaggtttaatttaataattataatatyggaaaaggaagtaaaggtygaagtttattygyggttttgaggtttgtgggaaaygtagtttaataaygaaagagttttgaagtttaagyggagttygttggtygtaggggtygtattaygttttagattttggagttttygggtgygtagatttttgttattagtagaggttgtygttgygygttttttaggygyggaagaggyggttggtggtttttgayggtaaggtgaagtygaggtagtaatygggaatttaggttgggaggatagaatggggaataggaagttggggygagggtggttttgggggaggtggggggtygyggaattttaggtggtttttgttttatttttggaaagaatyggaagttygggtyggggagggtgaagggagtygyggattyggttgtttagtygaggaggaaattyggattttaggttgagggaggtygaagaaggaattggagggtygggttgggaaggtttgaagygggtatagtttttaggttggggagggtygaggggagaattyggagtttgagtygggygag

SEQ ID NO: 10041 - DNA, 308 bp, synthetic construct
  misc_feature 1..308: note = Description of Artificial Sequence: Synthetic polynucleotide
  source 1..308: mol_type = other DNA
tttataggtygagtttaygagtttttygaggggtgagyggttygggttttttggygttttggtyggttagttaagygttggattatattttttagaggtayggygttyggagygttggattatattttttagaggtatygttttyggagygtagttttattttygttagtttgygagatttggaggtttygygtggggagagggtygygtttgtggaggagtttggtttygtatttgttgggttggygaattygaaattgggtttggaattygggagttagattttggattttgaattgtatttttgt

SEQ ID NO: 10042 - DNA, 1100 bp, synthetic construct
  misc_feature 1..1100: note = Description of Artificial Sequence: Synthetic polynucleotide
  source 1..1100: mol_type = other DNA
ttggttttaygtagygtttgtagattgtgagttygtagggtagygttatyggtttatgtagtagtygtyggtagygygggtagtygagtaggtygyggggygygyggggtttyggggtyggttttttttygtygggygtttygggttygtygttygggtttttygyggatagyggtyggtygygtaggtttayggygygtattaggtygttygttagtttttttagttttttyggtygtagygtttygagtygygyggygtygyggaaygygtttagggtttyggggaggyggtyggygygggttagygygttttttagttttaggtataggtygyggttyggttgygttagttyggttagtatggagygaaagagttyggttgttatttygtagtygttygygyggaaggtttygtygtttttttttaagygttgggygatyggtttygygyggtygtagttaggatattggggyggyggyggyggygggatyggttyggggtttattatygyggggttgygaygaygygggttyggagygaaggygyggagtagggaggatgygttgttgttgggaattggtyggygggagygyggttttagttttygttagtagttaygygygtttgggggyggygygttgygagyggttgagatygygggygggggygggygtttggtttgggtagygtttttagygyggtgtgggyggygagtttygtagggttgtaatygtttyggggtgggggtygggataggtatygygggygtaatttgagtttttgtttaygygtagyggttttttagtttygtyggtttaggtaatttaggtygttgyggtaaygtagtgatygygttttaggttygygttttttgygatgttttttttattygtttgagggtttttgygygattgygygygygttttttgtttgtygttttttygtagaggtgtyggggttttgggagtaggtggttttggtygygggttgttggygygtyggtatygyggtatttgtttttttttagaggtttggtygtttttataatttgtggtttygtttaagtaagaatttaggaaaagttattaaaygtatta

SEQ ID NO: 10043 - DNA, 214 bp, synthetic construct
  misc_feature 1..214: note = Description of Artificial Sequence: Synthetic polynucleotide
  source 1..214: mol_type = other DNA
ggygagagtaaaaaaaaaaaaaaaaaaaaaaaaaaaaattttaattgtaaatattatttggaggtgggygagggygyggygtgygygyggyggygggtggygggyggygygggygtttttgyggggattttyggttttttagygygttttagtggaygttttgtttttygttggtttttygtgttygttataatttgtaatatattattttttt

SEQ ID NO: 10044 - DNA, 582 bp, synthetic construct
  misc_feature 1..582: note = Description of Artificial Sequence: Synthetic polynucleotide
  source 1..582: mol_type = other DNA
ttttttygygtgygtttygtatttgtygggggttygtattygttttygtyggggttttagggggtaygayggtygtggttyggygtttttgggaggggagygggatattttygaaggyggygygttggaggyggggagyggtyggggygtayggagagggyggggagttygygggagggggaggagggggaggagggggaggaggygygaggtgggggggagygyggygggyggtagggagggagygggagggaggtaagaaagtagtagaaagtgaggttggtaggyggyggtaaaggagtyggygygyggyggyggtaggaagtttgtgttygagaatagtagaaataagagttagggagggatygyggtygyggyggyggyggygagagygaaagaggaaattgtagaggaggaagttgygtygtagttygagtygttyggtattttygtygtttttgygttygygtygygttttyggygttttttttttagygygttttyggtygttttttygygtygygttygtyggttatggttygggagaayggygagagtagttttttttggaaaaagtaagtt

SEQ ID NO: 10045 - DNA, 203 bp, synthetic construct
  misc_feature 1..203: note = Description of Artificial Sequence: Synthetic polynucleotide
  source 1..203: mol_type = other DNA
ggygatattygygttagttttygggayggttgggttygggttggtygtygattttygattttttattagatgtttggtagagttyggygygttyggagttygygttttttagagggaaggggtygygygtygtygyggyggttttgaggttgayggtygggaggtgaaaggtyggagtgyggggttaggaygttttttggagg

SEQ ID NO: 10046 - DNA, 823 bp, synthetic construct
  misc_feature 1..823: note = Description of Artificial Sequence: Synthetic polynucleotide
  source 1..823: mol_type = other DNA
ygagttattygtatttttttttaggagttatagttaggttagaagagtgyggagggayggggttygggaagagtagggaatttttagagttygtagttaaygyggaggtgggygagygggygtgygygtatttatttgtyggygygagggagtgtygggggggaagggagtggtttttaaaagggggaggggagaaggtagggggyggggagaagtyggttttttaggattyggttgyggyggygagggaggaggaagaagyggaggaggyggttttygygttygtagggtygtgttatttgttygttygttygttygttygttygttygttgygtygygttgtygatygttagtatgttgtygagagtgggttgtttygygttgtygttgtygtygtygtygttgttgtygttgttgttgttgttattgggygygagtggyggyggyggyggggygygygyggaggtgttgtttygttgttygttttgtatattygagygtttggtygtttgygggttttygtyggttgygtygttygtygyggtggtygtagtggtyggaggygttygtatgttatgygyggagttygttygggagtygggttgyggttgttgttyggtgtgygttyggttggagggygaggygtgyggygtttatatttygygttgyggttaggggttgygttgttatttttattygggtttygagttgtttttgtaggygttggttatgggygagggtatttgtgagaagygtygggaygtygagtatggygttagttyggagtaggttgtaggtaaygyggtttggaataagtagttg

SEQ ID NO: 10047 - DNA, 293 bp, synthetic construct
  misc_feature 1..293: note = Description of Artificial Sequence: Synthetic polynucleotide
  source 1..293: mol_type = other DNA
tygygyggtttttataatgtagggatttttttgagtggtggtygttttygttttagttttyggttattygtagttttatatygggttattggtttattatygagatagttagygagtttaggyggtttttgtagygttgggagaggaatgtgygygaaattaattagagygaaattagtyggaggagtyggtygaggtgtaggtgtaggygtagtttygtttagaattttttygttatatttaagggagttggaagttygggagggtgttgttttttttttttaggaatagag

SEQ ID NO: 10048 - DNA, 262 bp, synthetic construct
  misc_feature 1..262: note = Description of Artificial Sequence: Synthetic polynucleotide
  source 1..262: mol_type = other DNA
yggaygygttgattggttttaggggaagygggaggygagaataatggtttttttttttygttaaaagggagyggttgtygggttyggggatagggaygygygtgtagggygtagagttgggtygagtygtygtyggygttaygygagtttygtagtygtygygttygggtaatgggtygggggtattgagggtygtyggggtygagygyggaggggggatygagttagtgtygtgttttygggtygygttaatatgtttygc

SEQ ID NO: 10049 - DNA, 240 bp, synthetic construct
  misc_feature 1..240: note = Description of Artificial Sequence: Synthetic polynucleotide
  source 1..240: mol_type = other DNA
tygttgyggggtggagggattygygttttttagtttttygggttygggtygyggggatygtgygygygtttttttttygggtaaggtygggyggygggygygtygyggtttttggggttttygtttttttgttygttatygtttgygggagtttttggtttggaggggttyggggygygttggygattgygggttyggygataggggyggttggtggygggaggatagtgggaggaaggt

SEQ ID NO: 10050 - DNA, 1240 bp, synthetic construct
  misc_feature 1..1240: note = Description of Artificial Sequence: Synthetic polynucleotide
  source 1..1240: mol_type = other DNA
agygggtyggggtygtyggttaagtttttgtttggggaygyggyggygygtyggagagtttygaggttgtttgtatygttttagagttttgggttgtgttygygtagggatygggtygggtagagtygggyggggtggagaggtaagyggagygygyggtggggttgaggggaggygtggggygagtgttygttgttygttttttagtttttttgtttttaygttttttygttygtagtygttygtagttyggyggtgtagttgtgttggattyggyggygtygtagttttttatygttttttgatgttattggggtgygggggttygggyggttyggtgygygggttaatagttgtayggttttygyggtttagyggygtagggyggggygygtttgatagttttttygtttttygygttagttgattggyggttygagyggtttyggagyggyggaggtttggyggagygttggagyggagtgggayggttagtttgggtttattttygtattttgtaggtttyggtttaygtaygttygtttggagtgygygttttatttttaggttaaattatygttttttttttttygygtattttttttttttagttttttttgtattttatttttatttygtgttatttttaaggaggtttagaatgagygtygggataaygttttttgggttttttgtttttaagyggttttygtttagtgggygaygttttgtgtgttttygyggtttttggtygtgtgtgtygtgygtttttgtttttggagatttgygygtatttgtatgttggggagggygggttygaggtttygagagttgtgtttagatttaatttttaattttaggggattttttttaggttaagygagggttttttttggygggtgtagtygtagagttttgaggttygattttattggtttygtygtttttygygtttattttatygtataatgtttatagtgaaggygaygggaaaagtagtagtttaaaggttttgaatttttttttttygttataygtayggaattttgagttttyggagtttyggggtygaggtyggttygggayggtgtttygagtagttttttattgttggggagtyggttttgtttttgtttgaaygttttgtaaygattaagtagatttyggygttagttygtygyggagaggtttaaataggtataaagtgygattttaagtggttattgtgygtaaaggygtc

SEQ ID NO: 10051 - DNA, 222 bp, synthetic construct
  misc_feature 1..222: note = Description of Artificial Sequence: Synthetic polynucleotide
  source 1..222: mol_type = other DNA
gggygatttgttgttttygagtgtttttgggttgygttttttttttttatttgggyggtygygttaagygtagaggtygygggygtttyggggttagaggygttttyggttygggttatggygttyggygtygggggygygaggagyggtttatttagttagattttttatttygttatygttattagatattattatygttgtgtagtgtgggtttttatt

SEQ ID NO: 10052 - DNA, 714 bp, synthetic construct
  misc_feature 1..714: note = Description of Artificial Sequence: Synthetic polynucleotide
  source 1..714: mol_type = other DNA
tttagggaaagtttttgaaagtataattyggaaaatttagtaatttttaaaaaaaaatggtttttygttgttataagttttttttttaagatttagggttygtagtagaatattttgatttaaaataaaaatattatgataaaaatattttaggaggtagtyggttttatttygtttaaagtyggatttygtttagtttygtgaaagygaaggagtattagygttttttgatttygtatagttttttyggtagagayggttygttttttttaagaatyggaagtyggatagygttaggaygttttattttttttatttgggatttagagaggtagyggttaaggatagggttttygtygaggttatygggtagygtttaggtttyggtttttgggaggggagtagygggggaggggtayggggaggggygagggyggggygygtttgggtttyggygttgggttttttttttgttygtttygggggatatttataggatttttgtagatttttgtygaggtaggatggaggtttgtagggatgtatygygggttygygattygggyggtyggaatatagttttttttggtyggagatyggttyggtygtgagtygtgtttgtgttaggttttttaygttgtgttttagggttttagtgttyggygygtygggggttgtatygttagttatttggggtaggaaaaaggaattata

SEQ ID NO: 10053 - DNA, 1216 bp, synthetic construct
  misc_feature 1..1216: note = Description of Artificial Sequence: Synthetic polynucleotide
  source 1..1216: mol_type = other DNA
aagttttagaaaygttttyggaaagttttttttaatgggaagygatttygtygttgagttaagygttygaattttttttttygyggtagggatatyggttygggttaggtttgyggaggaygttttygggygygtatatatagttygaggaygygttttgtattttaagaygtagggtyggattttatttygaaatttggtttttatagttttaggtygaattgtgtttggtttttagttttygagttygagttttaygtygtaaagagatggggttttattgtgtttagttggttttttagtayggaygtgtatttttttttggtttgttttttgttaaaaatyggtagtgygtttygtttttttgtttagtygtagtttgtygttttttagataaaaagyggygatygyggttyggttattygagtttygtygygttgygtttttgttgggyggtttatagatggtgtttagtayggggtygygtygagggygggggygggaggtygygaagagggtygggygggaggggaggagayggyggagtagttaattygygygyggtttattagttgatygtttttgtttatattaggtgtaygtyggttgyggggagtataaagyggggygtatygygggygtyggtaaygagtyggtgaaygaggygaggttygtgygttygyggttgtaagygttygtttggyggggagaggggtygayggygttagttygggyggyggtatttttaggygtttggggygttttttttyggatttggtygttygttgtttygttttttgtattttattttttygatttttttttttagttttgtttttttttgttttggtttttgagagtygattgagtttagtttygtgtagtagyggttgtttgtgtygtygtttagttttyggttttggtgttttttygggggtgttttaaggagttagtgygygttgygggttgggaaggaggygtygtttagttagttttttttttttttttygttttttttttttttttgttgttgttgtygtygtygtygtygtgggtgtygggttygygygtattttaatatttttattagttgggtttyggggtaagtttttggtyggtygygtygyggtaggaggtgtgggaggtagygaggggaagtygaggtaaatttggtggygtgggagattttayggggtttggggaattttagggtaag

SEQ ID NO: 10054 - DNA, 207 bp, synthetic construct
  misc_feature 1..207: note = Description of Artificial Sequence: Synthetic polynucleotide
  source 1..207: mol_type = other DNA
agtttttygtaaatttygtttttttygtttggtayggtttttttgtatygttgtgtttygtttttaggtttttgttygttaagaatgtttgtttygggggygygttygttggttaggaatttgtyggtagttttygggaatttttgaggatgyggaggtgggttygagagttgyggtttygatgtyggggtgggagttaggtaggtc

SEQ ID NO: 10055 - DNA, 253 bp, synthetic construct
  misc_feature 1..253: note = Description of Artificial Sequence: Synthetic polynucleotide
  source 1..253: mol_type = other DNA
aygtttagggataaattgggagtygtgattgttaggtygygyggaggttgttttggtygtttttgyggttaggtgaaggygtagaggtagggaggtygggygagygtaggygggyggagagtagattaygyggaagaggtygagagagaaagyggggtattyggtygggggggttatttataagggaygttgggtaygaaggaggttggggygaagatgagtttaggggttgggttgagagygttgygtagtc

SEQ ID NO: 10056 - DNA, 209 bp, synthetic construct
  misc_feature 1..209: note = Description of Artificial Sequence: Synthetic polynucleotide
  source 1..209: mol_type = other DNA
ggayggtttgtgagggatgygtygtttattgtttygygtygtttgatygttttygtttygattygyggtgygttatagtygggttygyggtygttttygtygygttgtygttyggtygtygygttygyggggtygygttyggtayggttatgtggatttttayggaggaggagaaatayggygtaggtaggtgaggtttaggtttggtc

SEQ ID NO: 10057 - DNA, 225 bp, synthetic construct
  misc_feature 1..225: note = Description of Artificial Sequence: Synthetic polynucleotide
  source 1..225: mol_type = other DNA
ygttyggtttygtttygtaggttgtaggyggttttggagggggygttttygtygagygygygtttygygtygtygtttyggattttttttyggygtygygygggtaggttygattaggyggtygygggtttyggttttyggttagttttttagggttygyggttygtttygtttygygygttygtttygttgygtaattygatttaagttggaagtygatygtag

SEQ ID NO: 10058 - DNA, 1133 bp, synthetic construct
  misc_feature 1..1133: note = Description of Artificial Sequence: Synthetic polynucleotide
  source 1..1133: mol_type = other DNA
aaggagagttggaagggttygtgtagtaggatagygggyggaagyggggygggygagygyggggtygtyggtyggtagtyggagtagttgtygyggygttygaatttyggyggtygtygygttttttygtttygyggagatygaygtaggygttygttttygaggtygaagggtattgggyggygagggttgyggtagttggygatttygggggygtttgygyggygygygttagaygaggttgtttyggyggttatttygygatttygygtygtygggatttgygygyggagaaygtyggttttggagggagtaygtttttttaaagtgtagaggagggttyggyggygygttttygyggaaattttttttattgtagttatttyggatgtygatttagtagtttgtttttygagaaaagagaggggatttgggtagaagggtttygtttgttttaaaagaaggtgtaaggattagaagataaygaaaygtttattttttgaagggtgggaaaaaaagaaaaagaaaaaggagttatttaygttggagatgttygttttagatttttttatttttttttttttygtttyggttttttttttygaggtttatttaatttgttagagaaggaggaggagtagaagatgggggtygaggaggaggggaagagaaagagaagtttgttaagaataaagtttttgtyggtaagygyggggatttygtagtggagggtattgyggagtttyggggagttatagygggggtttygggtttaaatgtttttgttyggagttygagtygatatatatatttagttygatttttttttgttttyggttygagttttttagtttggttygtyggttygtygttttgtaygttttygtyggttagttttgttaaagtaaagagttgygttttttgagttygttyggtygaggggaggggaygtttygagtttggtygygtgygaggtttygggygygttttggtttttyggttygagagygygtagttygggtttttttttygygttttgtttygtaggtgagyggttgygtttttttattgtttttttttttttygygtttygtyggygttgaaaagttatttatttgygtygtttttttttt

SEQ ID NO: 10059 - DNA, 478 bp, synthetic construct
  misc_feature 1..478: note = Description of Artificial Sequence: Synthetic polynucleotide
  source 1..478: mol_type = other DNA
yggttygggaggyggaaggtygyggatttgttygatagaagagtagatgaggggagatygaggaygttygggttyggggagtttaygaggaggttaggatygyggggtaaggaattygygggtagttattttygttaggggtagggttyggttagttaggygygagaaggttaggygaggtygattgygyggggtgaagaygttaggtygatagttgygggttttatygttagttttgaygygagtttgygttttggygayggyggagggygggtagggggygygggygttgttayggygtttgtttagaatyggtygggaaygtygygggygggttttttyggtttttygtttttttagttttgtttttaggttttygttygggttttttaagttgttagtygygttygttttygggtttttygttttttttttygygygtttttttttttagyggtygtyggatttttttagttta

SEQ ID NO: 10060 - DNA, 201 bp, synthetic construct
  misc_feature 1..201: note = Description of Artificial Sequence: Synthetic polynucleotide
  source 1..201: mol_type = other DNA
tygtaygyggagtttataagttgtttgtgtygttattttttyggttttggtatygttagtattttttaggaattttttaaattygttttayggtgtagaayggtaattgtatygagtttttgtgttaattagtattttygtaatatygttagtyggttttttttttgttataatatattaaaaygtgttaaaatatattaa

SEQ ID NO: 10061 - DNA, 208 bp, synthetic construct
  misc_feature 1..208: note = Description of Artificial Sequence: Synthetic polynucleotide
  source 1..208: mol_type = other DNA
gatgagygtygtgtagtatttttggttygygttgtttgttygtgtyggttataggttgtaggttagtagggygagygyggygagtygggtagggttygttygtttygygtagtttatygttttttyggtagtygtygttgttygyggatygggtttyggggtyggygtttagaggyggggygggygyggttygggyggyggygggagc

SEQ ID NO: 10062 - DNA, 210 bp, synthetic construct
  misc_feature 1..210: note = Description of Artificial Sequence: Synthetic polynucleotide
  source 1..210: mol_type = other DNA
atttygtataygtgtataaggtgttgaaataggtttatttygatatyggtattttttttaaagttatggggattatgaatttttttgttaaygatattttygagygtatygtyggygaggtttttygtttggygtattataataagygttygattattatttttagggagatttagayggtygtgygtttgttgtttttyggggagttgg

SEQ ID NO: 10063 - DNA, 229 bp, synthetic construct
  misc_feature 1..229: note = Description of Artificial Sequence: Synthetic polynucleotide
  source 1..229: mol_type = other DNA
tggtttatttgagtttaggggtttgagattaggatgattaatatggtgaaattttgtttttattaaaaaatataaaaattagtygggttatggtggttgaygtttgtaattttagttatttaggaggtygaggtaggagaattatttgaatttaggagyggaygttgtagygatyggagatygtattatygtattttagttygggygagagggagattttgttttaaaa

SEQ ID NO: 10064 - DNA, 209 bp, synthetic construct
  misc_feature 1..209: note = Description of Artificial Sequence: Synthetic polynucleotide
  source 1..209: mol_type = other DNA
aggygggggagagagatgaygttggyggaygtggttagygygggggtygggyggtgygttgtaggttatttgtyggygttttgagatttaggagttttygygttttygygtgggttttatagggtyggtttatagttttaatatagtagttgaatttttttygttgygtttttttttttttggaggggaatgttagaagagagagagag

SEQ ID NO: 10065 - DNA, 255 bp, synthetic construct
  misc_feature 1..255: note = Description of Artificial Sequence: Synthetic polynucleotide
  source 1..255: mol_type = other DNA
gaaggggtttggagttttttttttggggtattgtgttgggattttgaggattggggattyggagggagggtaggygtgtttttaattygttgygtyggaayggygtttgatgagyggygggttyggataygaggggayggggtygatttgtgggyggggttttggygtygtattaaaatygygtggggyggaggtyggtagaggtygygtagygggtttagggtagggagtggttttgattygttgyggaataat

SEQ ID NO: 10066 - DNA, 297 bp, synthetic construct
  misc_feature 1..297: note = Description of Artificial Sequence: Synthetic polynucleotide
  source 1..297: mol_type = other DNA
aggtttygtttattygaygtaatttgttygtttttttttatttttygaagggtggagtttgaggtttygtttttaagyggttttttttyggagtgtttggyggttagtagggyggggtaggaggttgggagagggaygggtgygggggtgggggagaggaagggagyggttaygtgtgaggggyggttygaggttaygtgayggagygtyggagyggagggagtyggggttgggagtttttttgagggaagaggagtggagtaggggggaygyggyggyggygttgataatggtgag

SEQ ID NO: 10067 - DNA, 232 bp, synthetic construct
  misc_feature 1..232: note = Description of Artificial Sequence: Synthetic polynucleotide
  source 1..232: mol_type = other DNA
gtgagttggttggaaagagggggyggagtgygyggagttagagtygttatygttgtygtagttgtygttattgyggygtttgggttgagtyggagggaggygggaggaygygtaggggyggtygtygtygtygttaggttatyggggygaaaatgyggtygttgtyggaggttygttaatttttyggggtggaagaggaggaggaggaggaggaaggggtttggagygatta

SEQ ID NO: 10068 - DNA, 247 bp, synthetic construct
  misc_feature 1..247: note = Description of Artificial Sequence: Synthetic polynucleotide
  source 1..247: mol_type = other DNA
tygygttygtagtygygtttttgttttttygattttygtatttttatttggttyggttttttygtttttttttyggtttttttttttaggatatttgtgtygttttattttttttattatataygtattttttattttaattttttygtttttttgttttttttttttygtyggtttttttttttygttgttgtttygagagttygatgtgggagggaaggygygggggaggggaggtygygaaggg

SEQ ID NO: 10069 - DNA, 292 bp, synthetic construct
  misc_feature 1..292: note = Description of Artificial Sequence: Synthetic polynucleotide
  source 1..292: mol_type = other DNA
gtttttygagttttttgyggygatttygatttattttygygggtgyggggygyggattygttyggtttagtttttgttttttaggygtttttttttttygygatttgtttyggtygtattygttttygttttagtaygygaygttgttyggygygatttttgttttttyggtttagttttatygttgttttygatttaattttagttgaaygttygtagttttagttttattttyggtttagttttagygtttttagttttattttyggttttagttttagttttagygttt

SEQ ID NO: 10070 - DNA, 201 bp, synthetic construct
  misc_feature 1..201: note = Description of Artificial Sequence: Synthetic polynucleotide
  source 1..201: mol_type = other DNA
gtagttyggttaayggaygggttagttggttttttttaggggtagttttgttttttttttygtttygttttttttttttttattatatygggttgtaattygagtygtygagttattgtttttttttyggatttttttyggaggttttgyggttygggttttygygttttgttgttttatgtagttttgagttttatagta

SEQ ID NO: 10071 - DNA, 201 bp, synthetic construct
  misc_feature 1..201: note = Description of Artificial Sequence: Synthetic polynucleotide
  source 1..201: mol_type = other DNA
ggttaygygtgtttttggygygagtgtgyggggttaggtygggagggygtgygyggatygggygtgtttaygygyggtagggaggggttaygagggtgygygygtttttggygygagtgggaagtgtggggattyggygggttyggtgtgaggggygtgtttttggggygagagtggggagtgagtgtgaggagtaagggt

SEQ ID NO: 10072 - DNA, 201 bp, synthetic construct
  misc_feature 1..201: note = Description of Artificial Sequence: Synthetic polynucleotide
  source 1..201: mol_type = other DNA
gggygyggtygggtaggttggggggtaggtaggggtygttttygyggggygggaatttygygtttttttttttygagttttattttttatggtaaagyggygtggggyggyggggyggagggagtygagggggyggggagggyggaygggyggaggggaygggaggtttagyggtttygggtttygttggttygggygtyg

SEQ ID NO: 10073 - DNA, 201 bp, synthetic construct
  misc_feature 1..201: note = Description of Artificial Sequence: Synthetic polynucleotide
  source 1..201: mol_type = other DNA
attttttttttttatttttttttttttttttttattgttttttttatttttttttttttttygtttttttttttggtttttttttttttygttygggattyggggggaggygygttgggtggttyggtagtygggggygggyggtagtttgtaggygtaattggtatgtaygtygttgtagttgagatygtttaataaagt

SEQ ID NO: 10074 - DNA, 201 bp, synthetic construct
  misc_feature 1..201: note = Description of Artificial Sequence: Synthetic polynucleotide
  source 1..201: mol_type = other DNA
tygttttygttaaaggtttttttaaggggtygttttagggtttygtttygtgtttygtttyggygtttatttyggygttygtttttttttttttttgttgyggtttyggtaggggttgttgyggygatttaggttgttgyggttttagttttattagttgttgttgttttttaaggagaygtygtygatagyggagtagtg

SEQ ID NO: 10075 - DNA, 201 bp, synthetic construct
  misc_feature 1..201: note = Description of Artificial Sequence: Synthetic polynucleotide
  source 1..201: mol_type = other DNA
gtgyggtyggggygttgttyggtagtgyggtgtttaygggattgataggtaggtaggtygygggttgggattyggatattaaagtaaaagtatygttgggygtyggaggagtygyggggtttttattttttttttgattgatttttaaattttaatttgtatttttttygtygtttygttttttttttttygatttygttt

SEQ ID NO: 10076 - DNA, 201 bp, synthetic construct
  misc_feature 1..201: note = Description of Artificial Sequence: Synthetic polynucleotide
  source 1..201: mol_type = other DNA
tatygygtygtgygttygygttyggtygttaggtgttttagtagttygatygtygagatgtttagttygtyggggtttygggygttatggttttgygtygygttgtgygtttttyggagggtyggyggygttttttagttyggttyggggtttatygtttgttyggttttttgttattgttaggaggayggtattatgttg

SEQ ID NO: 10077 - DNA, 241 bp, synthetic construct
  misc_feature 1..241: note = Description of Artificial Sequence: Synthetic polynucleotide
  source 1..241: mol_type = other DNA
ttgygygttttggyggtaggaggyggggtygggggyggggygtgagttggtyggggyggggtttatggaggggygggatygyggygttttataagtattgyggagygaggygygygttyggttagagagygagygygtaayggyggygayggyggygattttatygygtattttgttaggttttyggygtttagygttttaygygttttygygttttygygttttygygttttttttttyg

SEQ ID NO: 10078 - DNA, 201 bp, synthetic construct
  misc_feature 1..201: note = Description of Artificial Sequence: Synthetic polynucleotide
  source 1..201: mol_type = other DNA
ggyggtaggyggygyggygggttgggygyggyggtggttaggtyggtgyggttgtagtttatgtatagygtgttagggttgttttgttygggtagtyggtygtagygtatgyggtygggttaggygaagtygtattggygtatgagyggygygtagtyggttttggygygttygtatatygagyggtagggyggtagyggt

SEQ ID NO: 10079 - DNA, 201 bp, synthetic construct
  misc_feature 1..201: note = Description of Artificial Sequence: Synthetic polynucleotide
  source 1..201: mol_type = other DNA
aagtggggtgaaaatgattttagtgaatagtttagttttttgggatagtggtttggtatttttgaygtgggagtggygtttgttttgatttaatttggatyggtttagggataatatttttttyggagtagtygttttgtttygtttygagtagtttagttgygttttgtatgatygaattggatattttttatttttttt

SEQ ID NO: 10080 - DNA, 201 bp, synthetic construct
  misc_feature 1..201: note = Description of Artificial Sequence: Synthetic polynucleotide
  source 1..201: mol_type = other DNA
ttygygtttgtttygtattayggagtygggtttttagagtagtaaggttattaggtggyggtgttggygtagtaggyggagygtygggtgygyggggtygygtttttggttttygaaggtgatgaagatgggtttgygggtgagttttagtagtyggtataggttttttttgyggggygggatygttaggggggtgggtgt

SEQ ID NO: 10081 - DNA, 201 bp, synthetic construct
  misc_feature 1..201: note = Description of Artificial Sequence: Synthetic polynucleotide
  source 1..201: mol_type = other DNA
ayggttgggttttaggagatattyggaggggttygygggttyggttyggttttttygttggggggttattagtyggtyggtagygagatatttagaggttygtttttttatygygttgttatagtaayggtttggtyggttgygtttygggtygttygttttatttygygggttygttttgagttagtgattttagggatt

SEQ ID NO: 10082 - DNA, 201 bp, synthetic construct
  misc_feature 1..201: note = Description of Artificial Sequence: Synthetic polynucleotide
  source 1..201: mol_type = other DNA
tttagatggttttaattattggaggaaaaaagyggtttttttggtatgygtgaaaagtyggagttgggagagtttgggaaaagttgtttgtatygttygtyggtttttaaataaatygatgagttttttttttttttttagttttygggtttygggggagttttataaaatttaaatgaaatttaaagaagttatttttgg

SEQ ID NO: 10083 - DNA, 201 bp, synthetic construct
  misc_feature 1..201: note = Description of Artificial Sequence: Synthetic polynucleotide
  source 1..201: mol_type = other DNA
ttataaagtattagtggtgttttttygaggaatttaagatttttyggtyggttgttaagtygtyggaattttagtaggagaggaaggtttatttttttatygtatggygatgttygggagattggagaagtttaggtaggtttggaagttaattttyggtatatagtagttttygggaatgtagagttttagagtaagatt

SEQ ID NO: 10084 - DNA, 201 bp, synthetic construct
  misc_feature 1..201: note = Description of Artificial Sequence: Synthetic polynucleotide
  source 1..201: mol_type = other DNA
tagtagagayggggttttaatatgttgtttagggtggtttygaatttttgagtttaggtaattygtttattttatttttttaaagtattgggattataggygtgagttatygygttyggtttgatagtttttttagaatgaagtttgtttyggaaaaaagagttttggttagtgttttttttggggattagyggaaagtat

SEQ ID NO: 10085 - DNA, 201 bp, synthetic construct
  misc_feature 1..201: note = Description of Artificial Sequence: Synthetic polynucleotide
  source 1..201: mol_type = other DNA
aggggagttgaggggyggagttatyggggygygttttygyggttgygttttttttygtyggggagygygggtaygtaattyggagggtgttgggtyggttyggagtaygygagtagygggaggagggatyggggaatgattgayggaggygggtygtagaggtygttgtgtttygtyggttygtattyggtyggagtgtgc

SEQ ID NO: 10086 - DNA, 201 bp, synthetic construct
  misc_feature 1..201: note = Description of Artificial Sequence: Synthetic polynucleotide
  source 1..201: mol_type = other DNA
ggttttygttttttttgtaggyggattygttygtttttaggtyggattygygttygggatagggattyggtygagtygagtygtygygttagygttgygtygtyggtyggtgygtttagyggatyggagttgygygyggaatygtgttgtttygtttygttttattygtgagggtgagtaygyggyggyggtgygyggggg

SEQ ID NO: 10087 - DNA, 201 bp, synthetic construct
  misc_feature 1..201: note = Description of Artificial Sequence: Synthetic polynucleotide
  source 1..201: mol_type = other DNA
yggggagggaggttttyggaatttygagagagtattygtgtttygygggtttygtgtttygttttygggtttttttttttttaaygtaggggatttagttyggggtagtgtygggtattggygttggygtttygtttagttttgygattttttttygtttygttttttttygtttygtttygttttttttygtttygtttt

SEQ ID NO: 10088 - DNA, 239 bp, synthetic construct
  misc_feature 1..239: note = Description of Artificial Sequence: Synthetic polynucleotide
  source 1..239: mol_type = other DNA
agagggygagygagagagagatatatatatataygtataygtataygtaggttatatgaatgggaggyggtagttaattttaygaggtyggygagtygygyggygtattggygttgggagtagggtygtatttyggygygggggggygttaygtaggtgatgggygttttttygggggttaygygyggtygtttttttattttagtttyggtttttttgtttttttttttttttttttt

SEQ ID NO: 10089 - DNA, 201 bp, synthetic construct
  misc_feature 1..201: note = Description of Artificial Sequence: Synthetic polynucleotide
  source 1..201: mol_type = other DNA
tttttygtttttatttatttttttttattttttttttttttttttygttagtttygtatttattttttttatttygtaatttttttttgtttttatttatyggggttatggtygtagaagaggtattgtagayggtggattattataagattgagatagagaggttaattaaggagtttayggagattatttaygagaaga

SEQ ID NO: 10090 - DNA, 201 bp, synthetic construct
  misc_feature 1..201: note = Description of Artificial Sequence: Synthetic polynucleotide
  source 1..201: mol_type = other DNA
ttgtyggggagaatatgtattaggtggttgatggttttgtggatgtggtggtttgtattttggtgttgtgttttgtgaagaattaggagyggatttttygygaggtgtgtagagtgttgagatyggtgagtgaaagggtgtgaggaggattagttagtagtagttattattatagagggtaggtttgttaattttaggtgg

SEQ ID NO: 10091 - DNA, 201 bp, synthetic construct
  misc_feature 1..201: note = Description of Artificial Sequence: Synthetic polynucleotide
  source 1..201: mol_type = other DNA
gaggyggaatttaayggaagtgaagaaaagattaaygggaaagaaggaygagtaygyggtttygggatagatttttaaagtttttttttgygttttttggyggtyggagggggagtagygyggataygtttttyggttaatygttggttattaggttggagtggggtttttttttgttgttttttatgagattattgtttt

SEQ ID NO: 10092 - DNA, 201 bp, synthetic construct
  misc_feature 1..201: note = Description of Artificial Sequence: Synthetic polynucleotide
  source 1..201: mol_type = other DNA
gygattaygggtttyggygaagatgygtygtttgagygttygygyggttttygttyggggygggygtgatttttgttgaayggagattttttttttttttygatttyggayggygtaggtyggygttaggatagtttttatygatagygtttttttttattyggagagaggtatygatttttaaggagggtttygttaggt

SEQ ID NO: 10093 - DNA, 201 bp, synthetic construct
  misc_feature 1..201: note = Description of Artificial Sequence: Synthetic polynucleotide
  source 1..201: mol_type = other DNA
tygttttygtygttyggggtaggygygtygatggygtttttgaggtgaygtygtttatatygggttttttygggggyggaggaaatatttatgaatttttyggtagttttttttgtygggygttaggtaagtagyggtttygggygyggyggggygtygygggaayggtgtatattggtygaaatttattgttttttaaga

SEQ ID NO: 10094 - DNA, 201 bp, synthetic construct
  misc_feature 1..201: note = Description of Artificial Sequence: Synthetic polynucleotide
  source 1..201: mol_type = other DNA
ttygttatttggggygtttggggggttttggggygggggaggygggggttttgtttaatttygttattgttattatyggttaggtygyggtttggtaattygtgaataggaggtagggttgtagggygtgagggatgatgataaggaagtyggaggagtagyggyggtagyggagagtttattttggatgtaaatggtagg

SEQ ID NO: 10095 - DNA, 201 bp, synthetic construct
  misc_feature 1..201: note = Description of Artificial Sequence: Synthetic polynucleotide
  source 1..201: mol_type = other DNA
atttygygttttgygttttaattaggattgtttygygygtttttgagtttygggtttyggttyggatttgtagttttttaggtggttgggaaggtaggtgygtygttgttttyggygygyggygtttygygaggtttttagttttygttttggtggattttygttgggtgggagtygggagtggaggyggtygttttaggg

SEQ ID NO: 10096 - DNA, 201 bp, synthetic construct
  misc_feature 1..201: note = Description of Artificial Sequence: Synthetic polynucleotide
  source 1..201: mol_type = other DNA
ygattyggtygtgagygtgtttygttgtagttygttgttygttaggttygggtggtagygtaggatgtttttttggtttgyggagaagtatagatatyggygggagygygttaatygygttygtttygtatygygtattygagggggygygtaggtygygttyggtttttttgtttygtttygtttygttyggttttaaag

SEQ ID NO: 10097 - DNA, 201 bp, synthetic construct
  misc_feature 1..201: note = Description of Artificial Sequence: Synthetic polynucleotide
  source 1..201: mol_type = other DNA
yggtttgggaaggtttyggtttttyggttgyggttttagttyggayggygtygygtaattttgttatttttttggtttagtttyggttataggaggatttygygggtaaygygyggagtttttggtatttttyggyggtgttttttgttgtttgttyggggatygatttygtatgtttttaggttgatttgtttaagttyg

SEQ ID NO: 10098 - DNA, 201 bp, synthetic construct
  misc_feature 1..201: note = Description of Artificial Sequence: Synthetic polynucleotide
  source 1..201: mol_type = other DNA
gtaatttyggyggagtyggygtttttgggtatttttggttttygygtttyggtygtayggtgattattygggaggggatttygggygtttygtaatttttyggttttygtgggttttygggtygtttygtttttygtygtygygtatttttygygtttttyggttttyggtgtyggttttygtttygygtagtttygagtt

SEQ ID NO: 10099 - DNA, 201 bp, synthetic construct
  misc_feature 1..201: note = Description of Artificial Sequence: Synthetic polynucleotide
  source 1..201: mol_type = other DNA
aggaagttygaggtyggggygttattttaagggttttttygtttttttttygagggtagagaggygttygygttyggaygtattgygggaatatttggagygtyggyggagttyggttgttttygygggagggagttygaygygtatttttgggattyggattyggygttygygtttygggayggatttttgtttyggttg

SEQ ID NO: 10100 - DNA, 201 bp, synthetic construct
  misc_feature 1..201: note = Description of Artificial Sequence: Synthetic polynucleotide
  source 1..201: mol_type = other DNA
tygtttgtaggttgtttygggtygagtyggagygaygttgtygygtatttgggtagttttygggggtygygttgtgttayggtyggggtygttgygattgyggygtttgtatttgttaygtgattgagtygggtatgtttttygggtttttgtgtgagtgttatgagtgggtgtgygagatttaygaygggagtatttgtg

SEQ ID NO: 10101 - DNA, 201 bp, synthetic construct
  misc_feature 1..201: note = Description of Artificial Sequence: Synthetic polynucleotide
  source 1..201: mol_type = other DNA
taygtttggggyggtygggggyggggtttggttggaattgaygygtggagtttyggtggagggggyggggtttggttgggtygttgtttatagyggttttyggggtttggaggttayggggttyggaggttayggggttyggaggttayggggttggttgtgtggggggtttaggggygtagagtggttaagtagyggttt

SEQ ID NO: 10102 - DNA, 201 bp, synthetic construct
  misc_feature 1..201: note = Description of Artificial Sequence: Synthetic polynucleotide
  source 1..201: mol_type = other DNA
ggttttgtagttttgtagygttyggggyggtgtaggagtttyggggtgtygyggygttygttyggttgtatygttggtttttyggttygggttttaggttyggygttttttatttttaggtygygygygtttygttttttygaygatttttagtttygggttttygttatttaygagttttygttttyggtgagttgttgt

SEQ ID NO: 10103 - DNA, 201 bp, synthetic construct
  misc_feature 1..201: note = Description of Artificial Sequence: Synthetic polynucleotide
  source 1..201: mol_type = other DNA
gygttttygggggttgygtygtgtygtttgttgtgygygygtagaggtyggatagttyggttgygggaagggattygagygtagggtttgtttygygtttyggaaagtgtttagtttgyggagtyggaggttgagttggggtagatyggygttagaygggggtttgggtgagataygagttgggggtgyggtttgtagaat

SEQ ID NO: 10104 - DNA, 201 bp, synthetic construct
  misc_feature 1..201: note = Description of Artificial Sequence: Synthetic polynucleotide
  source 1..201: mol_type = other DNA
ttttttttattattttttygtttttttattttttttttttttttgttttgtaggattgagtagttaggygygagygaaaataaatagttggggttgygagygttttygtttyggtttygagagtaygtyggtttagttttttatttggggygttygtttgtttattatgaggaagattygygttaatgttatygttatttt

SEQ ID NO: 10105 - DNA, 201 bp, synthetic construct
  misc_feature 1..201: note = Description of Artificial Sequence: Synthetic polynucleotide
  source 1..201: mol_type = other DNA
gttygtgtygttgttgttggttttagygttygggttttyggtgagtgyggttttgtttyggttttyggaggaatttgtaggggagtygggggyggggaygygygggttygtaggtaaygtttttaggaaaggggygatgttagggaagttgggttgggaggaggygagttygtatygttgagtttttttagaaagggttgg

SEQ ID NO: 10106 - DNA, 201 bp, synthetic construct
  misc_feature 1..201: note = Description of Artificial Sequence: Synthetic polynucleotide
  source 1..201: mol_type = other DNA
ygttgggygtygttygtyggtttaggygygygaatttggygtttttagtgaattattygyggttygggygttygggttygggatyggtttttttttttttygttgagtygyggtygagttggttttttgtattttatttagygtygtygggaygygattatatygagatggtatygagttttttttaaaggtttyggtttg

SEQ ID NO: 10107 - DNA, 201 bp, synthetic construct
  misc_feature 1..201: note = Description of Artificial Sequence: Synthetic polynucleotide
  source 1..201: mol_type = other DNA
gttttagtttttgggtyggaagtttttttttttttttygtygtagtttttttttagttttttttttttygtygatgygggaaatttttttygtttygtttygttttttttttttagttgtattttygttyggttttttygtttagtttttaatttaggtttygtttttttttatttatttttygttttgggtygggttttc

SEQ ID NO: 10108 - DNA, 201 bp, synthetic construct
  misc_feature 1..201: note = Description of Artificial Sequence: Synthetic polynucleotide
  source 1..201: mol_type = other DNA
gatggygaygyggatttgtatygtygttttgggttygggtygagttttttygtyggattgggttatggttygygggattgyggygtygtyggggtttttaygtygtaaggtttagttagtyggtyggtagygattgygaygagggggygggggyggtgygagygygtttgtygttyggtttaggggagggataggggtygc

SEQ ID NO: 10109 - DNA, 201 bp, synthetic construct
  misc_feature 1..201: note = Description of Artificial Sequence: Synthetic polynucleotide
  source 1..201: mol_type = other DNA
gtttgtttygtygttygggttttgtggttggttattygygagttygtttygttttttttgtttyggttygttyggttygtttyggggttttygtygtaatygagyggagtttagygattygtygggtttatattagyggtygtttttttygaagygtttttyggtagygttygggttttygygtttyggaatatttatgaa

SEQ ID NO: 10110 - DNA, 241 bp, synthetic construct
  misc_feature 1..241: note = Description of Artificial Sequence: Synthetic polynucleotide
  source 1..241: mol_type = other DNA
ygygttggttyggtttttagttttttyggtygtygtttttygttygtygygtygyggygttaggagggyggggtyggggygygygtygttttttagtaagygggygggyggygttyggtttgagggagyggggyggttttygtyggygtygygygygttgtgtgtgagyggggtygygygygygygyggtaggygagtgagggaaygaggagyggtygggtgtgagtgtgtgggagtgaga

SEQ ID NO: 10111 - DNA, 201 bp, synthetic construct
  misc_feature 1..201: note = Description of Artificial Sequence: Synthetic polynucleotide
  source 1..201: mol_type = other DNA
ggtgttaagygtggggygygggttygyggygggagttgttygygaaatttagtgttgaagtaggygyggaygtgttyggtgtttggygygtggtagtaggygttyggtgtttyggtyggygaagattatggygtttatggtgaagattatggtgggyggttagttgaagaattttattgggagtttgggaggyggygagga

SEQ ID NO: 10112 - DNA, 201 bp, synthetic construct
  misc_feature 1..201: note = Description of Artificial Sequence: Synthetic polynucleotide
  source 1..201: mol_type = other DNA
gygygggayggagttttatgaaagttggaagaagtgattataaatygggattygattttygtagttttggygttygtttttttaygtaggttygggatgtyggttttagtttttagatgtygggaagayggygtyggttagtttaaggaagagtttttaggaggttggggagtaagggtgtygggttttttatgtygggtt

SEQ ID NO: 10113 - DNA, 201 bp, synthetic construct
  misc_feature 1..201: note = Description of Artificial Sequence: Synthetic polynucleotide
  source 1..201: mol_type = other DNA
ttttgttggttagagtygggtaygggtygggygggyggyggggatygtgatygyggttgygtgygttygygttygggygtttttgtgyggggttttggtaygtyggygggggygattygggtgtyggttygtgygggygataygygygtttttgyggggttgygyggggttyggagyggttgggggttttttgtygggygc

SEQ ID NO: 10114 - DNA, 201 bp, synthetic construct
  misc_feature 1..201: note = Description of Artificial Sequence: Synthetic polynucleotide
  source 1..201: mol_type = other DNA
tagatttygtyggtyggygygttattygygttagtattatggatagyggtygttttagtygygygtttagggttaggttygggttggtttttatygyggayggttgyggggtyggggtagtttygtaattttaaatttyggtagttttygtttagtagggaggggtttygggggygaagagtgggggagaagtygggaagg

SEQ ID NO: 10115 - DNA, 201 bp, synthetic construct
  misc_feature 1..201: note = Description of Artificial Sequence: Synthetic polynucleotide
  source 1..201: mol_type = other DNA
gtgtgagtttygggggttygggtyggyggttttgttagtygggtygtgyggttgygggggtggggyggyggygtygttgttatattagtttygggagyggygagagggaggttggggtgggggygygaggggggyggygygaggggggtygattttgygggtaggtgatattatatttygaaggttttagtgygygggygg

SEQ ID NO: 10116 - DNA, 201 bp, synthetic construct
  misc_feature 1..201: note = Description of Artificial Sequence: Synthetic polynucleotide
  source 1..201: mol_type = other DNA
gtygygttatggtgagtygggyggggtaggtygygygttygggtygggygggggygtyggggttygggggygggaagggggaggttaggaygaggaggggygygygyggyggyggggtygggtyggggtttgygggygggggaggggyggttyggygggygyggttygggggagggttygttttaggggtygygttygygg

SEQ ID NO: 10117 - DNA, 201 bp, synthetic construct
  misc_feature 1..201: note = Description of Artificial Sequence: Synthetic polynucleotide
  source 1..201: mol_type = other DNA
taatygggtattttygygygtataygttygtgtttaygtgtgtaygtttatatttttgtatatatttaggygygygttggtatatttattyggagaatttygtatatataygtattygtaaataygygggttttttgygttattaggaagtagtygttagaatygtygggtgttttttaattatttttgggagatttggtt

SEQ ID NO: 10118 - DNA, 201 bp, synthetic construct
  misc_feature 1..201: note = Description of Artificial Sequence: Synthetic polynucleotide
  source 1..201: mol_type = other DNA
ataygatatggttaagygtygtygttygaatyggtygtygtygatatttygtttyggttyggggttgaggaggaagtygagaaggaggaggaggaggyggyggyggagggygggggaagaggayggtygtttygggtttygtttgagttygtagggtaggaygagggagyggygyggtgagagaggyggatgaaggygagg

SEQ ID NO: 10119 - DNA, 201 bp, synthetic construct
  misc_feature 1..201: note = Description of Artificial Sequence: Synthetic polynucleotide
  source 1..201: mol_type = other DNA
ygygtatagyggyggygagtgggtygtgtaygyggatgyggggtgggagtgggggygtaygygygggygtgggygagygggtttyggtagtgtatatatayggtaggggygggygatagatgtagtgygtgygtyggagtttaagygtataaayggaaagagygggygyggtgygtaggggygggygtttagygggtttgg

SEQ ID NO: 10120 - DNA, 201 bp, synthetic construct
  misc_feature 1..201: note = Description of Artificial Sequence: Synthetic polynucleotide
  source 1..201: mol_type = other DNA
ttttaggggagttaagtagttygtttgaagttttttatttggaaatgaygtgtttaattyggygtttttgtagtttyggtygtttttttttgtttaatttygygtttttttagtttyggtygtttttttygtygtttttttttygyggtygtttatttttgagatttttggttttattgagaygtttagttttattyggta

SEQ ID NO: 10121 - DNA, 219 bp, synthetic construct
  misc_feature 1..219: note = Description of Artificial Sequence: Synthetic polynucleotide
  source 1..219: mol_type = other DNA
tttagggagggggcgggaggttttttttgtttagtttcgagtcggtggtgtagcgttcgttttcggtcgcgggcgtagattggcggtcgttttcgggttacgtggtgcgcgcggcgggcgcgttcgaggagtttgcggttgtttttggtttatagcgtttcgggcgaggagagcgggcggacgtcgggggttgggtcggtgcgggcggcgaggtaggcg

SEQ ID NO: 10122 - DNA, 315 bp, synthetic construct
  misc_feature 1..315: note = Description of Artificial Sequence: Synthetic polynucleotide
  source 1..315: mol_type = other DNA
cgagtttcgagtttcgtttcgggggttttatttcgttttttcgcgttcgcggttcgtttttttttattgagcgtttagttttcgtagttttttcggtcgtcgagcgtcgtgggcggggttttagggcggcggcgtttcgcggggagggtttttcgtgttgggggcgaggttattcgaggtagtttttcgttcgtttttaatttcgtttcgttttcggagtttataaagggaggcgattcgcggttcgttcggttggtattttttagtcgtcgttagtttcgtcgaggggagttagcgtcgtttttgaggggcgtt

SEQ ID NO: 10123 - DNA, 201 bp, synthetic construct
  misc_feature 1..201: note = Description of Artificial Sequence: Synthetic polynucleotide
  source 1..201: mol_type = other DNA
gtattcggtttagggttggagttggttgtagggttggttcgcggcgatttgggtagggtggcggttgttttttttttttttatttcgtttcgaggcgtagcgcgcggtagagcggttcggtgttcggcgggcgggcggttcgggcgggtttgcggtcgggatgaggacggcgttttcgttgtagagcgttggggcggcgcg

SEQ ID NO: 10124 - DNA, 201 bp, synthetic construct
  misc_feature 1..201: note = Description of Artificial Sequence: Synthetic polynucleotide
  source 1..201: mol_type = other DNA
aataatagggacgttgagaataataattacgattagtacggcgaaggcgtttttttcgcgggttagaggtcggcgttttagtttcgtagaattcggcgttcggttagcgttttttggtagtttttttcggtagttttaggtttttaagatttgtaggttcgtttcgaagtttttcgttcgttttttacggtcgtttcgagt

SEQ ID NO: 10125 - DNA, 201 bp, synthetic construct
  misc_feature 1..201: note = Description of Artificial Sequence: Synthetic polynucleotide
  source 1..201: mol_type = other DNA
cgcgtatttttttcgttcgtttgttcgcggttttttttttgttttcggagcgttagtcgttttatttcgtgatcggtttttcgttttgtttcgtaggattcgttcggacgggattacgtcgtcgtcgtcgtcgtcgtcgttcggagtcgcgtttcgggttttgtttgagtcgagtcgcgcgcggggtcgtagttatcgtcg

SEQ ID NO: 10126 - DNA, 201 bp, synthetic construct
  misc_feature 1..201: note = Description of Artificial Sequence: Synthetic polynucleotide
  source 1..201: mol_type = other DNA
atagagttgttttttttttttttgggttttgtaagttttcgaattggaggcggaaatgggggaagggttggaagttgtgtgtgaaaaataattattgtaacgggttttttttaggagtttagttcggtttgtattttggtggaattgttgttatcggtttatagcgtttaggtcgagtcggtagggttgggcgggaggttt

SEQ ID NO: 10127 - DNA, 201 bp, synthetic construct
  misc_feature 1..201: note = Description of Artificial Sequence: Synthetic polynucleotide
  source 1..201: mol_type = other DNA
tagttatcgcggcggttgcggcggcggtattttcgtttttattttcgttcgggattgttttttattgttttttcgtttttttcggatagtgagttcgcggcggggcgggggaaggagtcgtttttattttttttaagtttatttttaaagagatttttttttttttttttcgtcgtttggcgcggagtcgggacgatgttg

SEQ ID NO: 10128 - DNA, 201 bp, synthetic construct
  misc_feature 1..201: note = Description of Artificial Sequence: Synthetic polynucleotide
  source 1..201: mol_type = other DNA
aataagtagttcgggagatattttttttttttttagttttcgtttttttattttgttattttttagttcgtgattagttgttttttttttttttcgcgggcgtttagggttgagtaaatatttcgggtcgttcgtttcgttattagttggtttcgatcggcgtatcgttggcgattttttaggtaattcggcgttatgaga

SEQ ID NO: 10129 - DNA, 201 bp, synthetic construct
  misc_feature 1..201: note = Description of Artificial Sequence: Synthetic polynucleotide
  source 1..201: mol_type = other DNA
cgtggtttggtcgaggagttaatgggtcgggaggggcgcgcgggggaggagtttaggtgtagagtgtcgattggttagttcgtttttcggtatgtagatacggtgggagttacgtgttaggggtcgggacgattttttgttggaggttaacgcggggcggggaagggggcgcgagcgtttcgtttggttgaagcgggggga

SEQ ID NO: 10130 - DNA, 201 bp, synthetic construct
  misc_feature 1..201: note = Description of Artificial Sequence: Synthetic polynucleotide
  source 1..201: mol_type = other DNA
ggaggaggggaggcgttgttcgacgcgtttttttaagttttcgcgttttttttcggcggcggttgttcgggggcggtggttcggcgtcgtttttttcgatcgttttttttagggtttttttttcgtgtcgcggttaggttgttcggtcggcggcgcgttggaaatatgaagagacgttgtagttgcggtggcggtggcggt

SEQ ID NO: 10131 - DNA, 201 bp, synthetic construct
  misc_feature 1..201: note = Description of Artificial Sequence: Synthetic polynucleotide
  source 1..201: mol_type = other DNA
tttatttgggacgcgatttataggggcgttgtttcgttttgcgggaagaggaggcggcggtcgtcgtgattggggcgttcggttttattcgtttatagaacgtttttaatattaggggtttgaaagcgaaaatttcgggaaggtattttttgatcgtagattatattttgtagttgatttatatcgtttaggaggtagtga

SEQ ID NO: 10132 - DNA, 201 bp, synthetic construct
  misc_feature 1..201: note = Description of Artificial Sequence: Synthetic polynucleotide
  source 1..201: mol_type = other DNA
ataaaagagtagttttcgcggagcgggtttagagtttgttcggattgttcgatggttttcggttttttgagcgtcgcggttgtcgggttttgtgttcgcgcggggggcgggaaggacggtcggggtttttagtgcgcgtttcgcggagcggcgcgcggcgttcgaattggaaagttgtcgtcggcgtttgtcgtttttacg

SEQ ID NO: 10133 - DNA, 243 bp, synthetic construct
  misc_feature 1..243: note = Description of Artificial Sequence: Synthetic polynucleotide
  source 1..243: mol_type = other DNA
gttaaggttcggatcgttattttagtaatagttttagttatgtgatcggtaatggcggcgttgacgagaggtaggtgagttcggcgttttttatatttatcgcgcgtttttcgggtttcgttcgtattttttacgcgtttttcgttttttcggcgtttttttttttattttttttttttgcgcgcggtttcgggtttttcgtttcgtgttcggtcgattatttttttagtattttttagtttt

SEQ ID NO: 10134 - DNA, 201 bp, synthetic construct
  misc_feature 1..201: note = Description of Artificial Sequence: Synthetic polynucleotide
  source 1..201: mol_type = other DNA
tagttcgtttatttttttttggagaagttcgacgtagcgttcgttattttttttttttcgtgtgtagtttttcggttttaaagtatttatttgtttaattcgatttttattttataagatcgtaatcggttattatttttgtttttcgttaggatatcgaggttagttgtgttattgtttcgaggggttgtaggtgtagag

SEQ ID NO: 10135 - DNA, 201 bp, synthetic construct
  misc_feature 1..201: note = Description of Artificial Sequence: Synthetic polynucleotide
  source 1..201: mol_type = other DNA
tcgtagtatcggttattttattgttaagggtgttttttgtatttgttgcgatattttgggtcgtttttagtttagtttgtatagtatttttggttacgttcgtagtatcggtgattttattgtagatagtgtttttggtatcggttagtacggttttggtcgtgtttatatttatttggacggtttttttggttatattcg

SEQ ID NO: 10136 - DNA, 201 bp, synthetic construct
  misc_feature 1..201: note = Description of Artificial Sequence: Synthetic polynucleotide
  source 1..201: mol_type = other DNA
tttcgggtcgaggggaattcgcgatcggatttgtgggggagaatgaggatgaaaacgtggagtttttattgtttagggtttgatcggtcgatagggatttcgacgggggatcggggatttggggagggggtcgtattttttcgtttttttcgcggtttttcggtttttgtttgtttttttgatcgtttttaggggcgcggc

SEQ ID NO: 10137 - DNA, 201 bp, synthetic construct
  misc_feature 1..201: note = Description of Artificial Sequence: Synthetic polynucleotide
  source 1..201: mol_type = other DNA
agtcggggtagaaggaggagtttgaaggtttattatggggtggaggttgtttgttcgcgggttcgtttttagagttcggggtttattacgttgttttatgcgtttttgttggtttttgttaaatagttttttttttttgtgttttagttttttggttgtaaaaagggggtgtttatagagtttttttgaggagtcgttata

SEQ ID NO: 10138 - DNA, 201 bp, synthetic construct
  misc_feature 1..201: note = Description of Artificial Sequence: Synthetic polynucleotide
  source 1..201: mol_type = other DNA
ttggtttttatttggtttgcgagaaattaaattttgggtataagttatgaagtcgataagttcgggagatatagtgttagaattataaggtgagattagtcgttcggttaagttattttttcgttagtaggtgaggttcgtgaatagttaagttttttttggtacggcggaatcgtagtggacgcgtggaggggtttcgta

SEQ ID NO: 10139 - DNA, 201 bp, synthetic construct
  misc_feature 1..201: note = Description of Artificial Sequence: Synthetic polynucleotide
  source 1..201: mol_type = other DNA
aattttttatttattaacgtcggcgtcgttatgggtttagggggttgggtgaggtcgtgagagtcggcgaggaagtcggttttgcgggttcggtcgatttcgggtttcggttttgggttgcgagggattttagttttcgtcgtcgtgtaaaatgtatataaggttcgcggcgtcgtttttgcgcgtcgtgaggatataggg

SEQ ID NO: 10140 - DNA, 201 bp, synthetic construct
  misc_feature 1..201: note = Description of Artificial Sequence: Synthetic polynucleotide
  source 1..201: mol_type = other DNA
gatagaaggggagagtggttaggaaggaggggaggatggatatagggcgtttgtagaattggtgggtagatggacggagggacgggtcgtgtagtgtagtcggcggggttagggttaggtcgagggcgcgaggtggtagtcggttcggggaggcggaggttgagcgagcggtggtgtttgtggagttgtcggttgcggtgg

SEQ ID NO: 10141 - DNA, 201 bp, synthetic construct
  misc_feature 1..201: note = Description of Artificial Sequence: Synthetic polynucleotide
  source 1..201: mol_type = other DNA
ggggttgggacgtttcggcggagtaggcggcggcggtggcgagttggggagttttaggttcggcgttgtcggaggggttcgagtcgagtcgtttgcgtttcggtcgggtagcgtcgggttcgtttttcgcggggttacgttttgttaaattttgttgcggcggttagcgtagcgggttcgtaagcgggcgggaggggcgtc

SEQ ID NO: 10142 - DNA, 201 bp, synthetic construct
  misc_feature 1..201: note = Description of Artificial Sequence: Synthetic polynucleotide
  source 1..201: mol_type = other DNA
ttattggtgagtttggtagggtatagagaggatggtattattagttggagggggataggttttaattatgagtttaggatgtagagagcggtagggattatcggagttttttcggttttggtgttttggttttttttgtatacggtttttatatgacgtttagtaagtcggattttaatttgtttatttattttttatttt

SEQ ID NO: 10143 - DNA, 201 bp, synthetic construct
  misc_feature 1..201: note = Description of Artificial Sequence: Synthetic polynucleotide
  source 1..201: mol_type = other DNA
gaggttaaggcgggtagattattcgaggttaggagttagagattagttcggttaatagggcgaaatttcgttttttttaaaaatataaaaattagttaggcgtggcggcgttcgttcgtaattttaggtatttggtaggtcgaggtaggagaattacgggagttcggggtagggaggttgtagtgattcgagattacggta

SEQ ID NO: 10144 - DNA, 233 bp, synthetic construct
  misc_feature 1..233: note = Description of Artificial Sequence: Synthetic polynucleotide
  source 1..233: mol_type = other DNA
ggagagagagagagagagagagagacggagtcggagagggagggagcgagagaaagcgagagtttttcgttatttttcgtcgtttttagaatttatcgggcgtttgttcggcggttttagaaggtcgggttgcgttgtgggttgcggggagtcggaggttttttgattggttttttgacgttttcggattaattgtgttgttgtataggcgtggtttttataggtcgagtgtt

SEQ ID NO: 10145 - DNA, 201 bp, synthetic construct
  misc_feature 1..201: note = Description of Artificial Sequence: Synthetic polynucleotide
  source 1..201: mol_type = other DNA
cgcggtatagttatttttttcgtcgaggcggtattttaattttgtgtttttttaggatcgcgggttgtaggtattcggttttcgaagcggaggtcggagtcgcgcggagaagttaacggtaatgacgttttttgtcgatttttaggaggggataggttgagggtttggacgaggtcggaagcgtttttattgtagtttcgg

SEQ ID NO: 10146 - DNA, 201 bp, synthetic construct
  misc_feature 1..201: note = Description of Artificial Sequence: Synthetic polynucleotide
  source 1..201: mol_type = other DNA
ttttgagaagtagtagtagttggtttgtttgttgtttcgttttcgtgtatggttgtttagcgttggttttagtgtttagcgttttcgtttagtattttttcggttttttttttttatttttcgttttcgagttgcggggagttttagtttgggatttttgttttatgtttttgggtttttgttttggttggttcgtttttt

SEQ ID NO: 10147 - DNA, 201 bp, synthetic construct
  misc_feature 1..201: note = Description of Artificial Sequence: Synthetic polynucleotide
  source 1..201: mol_type = other DNA
ggtttcgtcgggtcggtcgttgcgagtttcgtttcggtttcggttatcgtcggggaggacgacgacgacgtggtgggggacgtgttggtattgttggtcgcgtttttggtttcggggtcgcgggcgtcgcgcgtggaggtcgtttttttttgtcgtttgcgtcgggacgcgttggtggagcggcgcgcgttgtacgagttt

SEQ ID NO: 10148 - DNA, 201 bp, synthetic construct
  misc_feature 1..201: note = Description of Artificial Sequence: Synthetic polynucleotide
  source 1..201: mol_type = other DNA
ttttttttagtatattttatgtaaaagttagtaaaaatattttttttataagtttaaataaatgtttaaaaatatgtaagttaggaagttatttttaatacgtatattttttttatatgtagaagtaatggtgagaattttttatattttttgtagtagattttcggtttcggggttgggtttttagtaagtttatttttg

SEQ ID NO: 10149 - DNA, 201 bp, synthetic construct
  misc_feature 1..201: note = Description of Artificial Sequence: Synthetic polynucleotide
  source 1..201: mol_type = other DNA
ttcggtcgtattttcgttttatttttacggtagggtttttagtgtttgattaagtttaagttcgagtttttcggcgcgttgtttatcggttgttttttcgcgttttttttttttttttattcgtatcgtttcgttttttattttttttttgttttttttttattatttagtttatatttttttcgttttttttttcgtttt

SEQ ID NO: 10150 - DNA, 201 bp, synthetic construct
  misc_feature 1..201: note = Description of Artificial Sequence: Synthetic polynucleotide
  source 1..201: mol_type = other DNA
gggattgggaacgggatagggacgcgttttaatttatttagcggtggagttggggggcggcgcggttacgtgggatggcgggtagtttaggggattcgggcgacggggtttggcgggtagggttgttttagtcgtttttataaagtcggttttttcgatttttttttttttttgtagtttttttttttttttttgggggtt

SEQ ID NO: 10151 - DNA, 201 bp, synthetic construct
  misc_feature 1..201: note = Description of Artificial Sequence: Synthetic polynucleotide
  source 1..201: mol_type = other DNA
tagttatttatttgttttttacgttttatttattagcgcgtacggtttcggtaattttattcggagcggggcgtcgtcgtcgtttttgtcgtagttcggtcgggtcgttgggcgtaggggatttcgcgtcgtcgttgtcgttgtcgtcgtcgtcgtcgtcgttgtcgttgttgtatttttcggcgagcgttgttgtttttt

SEQ ID NO: 10152 - DNA, 201 bp, synthetic construct
  misc_feature 1..201: note = Description of Artificial Sequence: Synthetic polynucleotide
  source 1..201: mol_type = other DNA
tttgggggacgtcggacgttatgttgtggaaaataatcgataatgttaagtacgaagaggattgcgaggtgagttggggtttcggggtgtagtttcgtttcgtcgaggatagttcgggaggtaggggttattggatcgaggtcggggacgagggtataggagttttggtttttcggtgggacgggatttattttttcggat

SEQ ID NO: 10153 - DNA, 201 bp, synthetic construct
  misc_feature 1..201: note = Description of Artificial Sequence: Synthetic polynucleotide
  source 1..201: mol_type = other DNA
gggagggaagaaggaggcggcgagcgggaagaggaagaagacgtaggtagcgttaggcgagtttaggggcgtcgggagcgcggagttcgggttacggattcgcgggagtttattgcgttttcgggttttggagggttgtttttgttcgtaggttcgggcgttttcgttaggaggcgatagcgttatgtttttttaggtttt

SEQ ID NO: 10154 - DNA, 201 bp, synthetic construct
  misc_feature 1..201: note = Description of Artificial Sequence: Synthetic polynucleotide
  source 1..201: mol_type = other DNA
tttagtcggtttttcgtatgattggattatatgagggatttaagttcggttagttgttatttttcggattatatgcgtgtttagggatcgttttttaattcggtatggggatttggaaaaaaagattagggtagagggattggggtcgggttcggtgatcgtttttcggtaattaaaggatagtaaaggacggtttttgat

SEQ ID NO: 10155 - DNA, 410 bp, synthetic construct
  misc_feature 1..410: note = Description of Artificial Sequence: Synthetic polynucleotide
  source 1..410: mol_type = other DNA
cgtatgcgtttaggtcggttcgtaggtttttttcgttttagtcggtagttagttcgttcgcgttggggttatcgcgagtcggttcgtagcggggttatcgcgattttcggcgtagatatagaggtcgtttttagtttcgtcgtttcgtggtttcgttttcgttgtacgtttttttatttttcggatttcgtagggtcgcggcggatacggttcgatcggggacgtgaacgcgtagaattatattttttagcgtttcgttcgcgttggaattatatttttcggggggttcggcggtgtattcgtcggggtcgcggattggaggttttcggttggaaaagttttttggcggttaattggggaggattggaagaaatttaggatggagttagtattgttggtttaatatgttt

SEQ ID NO: 10156 - DNA, 201 bp, synthetic construct
  misc_feature 1..201: note = Description of Artificial Sequence: Synthetic polynucleotide
  source 1..201: mol_type = other DNA
aagtttttgggaaagattcgttttattttcggaagttagagggcgttagttgtcgggttgaaaaggggtgtggggaggggaagtagttttatttcgggttcggagtttgtaggagagagaagtggggagtaagaagtgaattttaggggtttatagggttttcgtagatgtttaggtcggttaggaatgtatttttggttt

SEQ ID NO: 10157 - DNA, 201 bp, synthetic construct
  misc_feature 1..201: note = Description of Artificial Sequence: Synthetic polynucleotide
  source 1..201: mol_type = other DNA
tttattacgtcggggcgattcgttgtttgagcgagtacgtttcgtatttttttcgcgacgcgcgtatgttgttcggcgtttcggtcggggcgttgtattgcgtcggcgtttttttcggtatttcgttgggtgcgtttggggacgttgttcgggttttacgtgcggagtgggtgttttttaggtcggggagcgggggatttt

SEQ ID NO: 10158 - DNA, 201 bp, synthetic construct
  misc_feature 1..201: note = Description of Artificial Sequence: Synthetic polynucleotide
  source 1..201: mol_type = other DNA
atttttggattaggaaatagtgtgtgtgtatacgagagagagggatagagagaggggggatatgtggagtgtattggaattattataatttttatgaaggcggtatcggagttattggtattatttgtgtaatttttttttatgtttgacgtcgttttaaaataaagagtgagttgagtaaattaattcggtagggtatat

SEQ ID NO: 10159 - DNA, 201 bp, synthetic construct
  misc_feature 1..201: note = Description of Artificial Sequence: Synthetic polynucleotide
  source 1..201: mol_type = other DNA
gcggcggggttgggtttggggttggacgttgatttaggatttcgtttttgttcgttttgcgtcgcgtttttttcgggtcggttttgatcgagtagttttacgcgggttcggggttcgtttattcgataggagcggggggttgtagtttacgagtttacgagttcgtagcgacgtattcggagtgtaatttcgtagagttac

SEQ ID NO: 10160 - DNA, 201 bp, synthetic construct
  misc_feature 1..201: note = Description of Artificial Sequence: Synthetic polynucleotide
  source 1..201: mol_type = other DNA
gtatcgcgcggcggcgtttggcgggtattgttgttcgcggagggacggtgggggggttttagtagttggcgggggtggagggggcgggagagggagtttgcgtcgggttgagtttggaggtgcggggcgggttcggggagcgtttttggggttttttttgttatagtcggggcggttggaatttttttttttttttttttt

SEQ ID NO: 10161 - DNA, 201 bp, synthetic construct
  misc_feature 1..201: note = Description of Artificial Sequence: Synthetic polynucleotide
  source 1..201: mol_type = other DNA
gtcgcgtcgtcgggtttcggggatatttttcgtcgtttttttcgattcgcgtcgtcggggtcgtcgggtcgtagggtacggggtcggcgcggggggggagcggagaggggttggggagttttaggggttcggggttcgttcgcgggggatgggtagggatttcgggtcgcgtggggtgcgggggtcgttcgtattgaggac

SEQ ID NO: 10162 - DNA, 201 bp, synthetic construct
  misc_feature 1..201: note = Description of Artificial Sequence: Synthetic polynucleotide
  source 1..201: mol_type = other DNA
tttttttttaaaaagagttttttagagttgtcgaaattttcgcggggtgaaagttaaatttttggagtcgttgtgtagtcgggtagaggatacggcggcgcgagtcggaaagataagtgtttaggcgaatgggaaaggaaagattttaatttttgtttttattgttagttgaatgtttataaaaattaaagggaatgcggg

SEQ ID NO: 10163 - DNA, 201 bp, synthetic construct
  misc_feature 1..201: note = Description of Artificial Sequence: Synthetic polynucleotide
  source 1..201: mol_type = other DNA
atggtttattgcgtaagtttatatttagttttaggaagcgagttttacgtcgttttagttttgtatttatagtcgttaagcggtttcggaagtcgaatgtcggataggttaaagatagcgtcgttgtttcggtattgtcgttagagggcgcggagtcgtcgtgttggtttgtattttttttgttacgttagtcgaacggtt

SEQ ID NO: 10164 - DNA, 201 bp, synthetic construct
  misc_feature 1..201: note = Description of Artificial Sequence: Synthetic polynucleotide
  source 1..201: mol_type = other DNA
gcggttcggaaatgagcgtttttcggggatagggggttttgcggggcggcgatagttggatttttagcgcgtataaagtttgcgggaggatttattgtagcggtcgttttttttcgtttagcgagggcgggcgtaggggcgggggatgtcgaagggttaggtttgtttaggtcgcgttattttcgttttagacgtttagtt

SEQ ID NO: 10165 - DNA, 201 bp, synthetic construct
  misc_feature 1..201: note = Description of Artificial Sequence: Synthetic polynucleotide
  source 1..201: mol_type = other DNA
tttcgagggtcgcgcgggtttaggcgtttacggtttcgtagcgtcgcgtttttcgcgagaacgtagagattcgggttcgttttgagtcgtcgattgcgggcgggagtcggcgggtaaggcgcgcggtcggtagtcggagcggcgcgtaacgtagttgagtgaggtcgtcggtggaggtacggagtagtaggcgttcggggc

SEQ ID NO: 10166 - DNA, 294 bp, synthetic construct
  misc_feature 1..294: note = Description of Artificial Sequence: Synthetic polynucleotide
  source 1..294: mol_type = other DNA
tttcgcgaaggtttcggttcggtcgggcggggtggggcggtttcggttttattaattagcggtttgttgtggatgtcggcggaggagatgttatttagggcgggaaaaggggcgcggaagaggggcggggcgggttacggcgcgtagggtttttttttttcgtttcggatttaattaattgggtttgagtttttgtcggggagggggcgtcgggcggggtcgcggttgggcggggcgggggatcgggatcggcggcgggggttgcggttttgtagtggaagtatgggcggcgag

SEQ ID NO: 10167 - DNA, 201 bp, synthetic construct
  misc_feature 1..201: note = Description of Artificial Sequence: Synthetic polynucleotide
  source 1..201: mol_type = other DNA
gtgtggaggtttacgtagcgtttttggttggaacggggaagtttgtatttagttttgggagtgggtttgggagagggaggaggagtcgtcgggagtttggcgggagggcggtgttttcgtttgggtttttttttgttgttttagtttcggtagtttttatagtagtttcgaagggtgagaatttgtttttttatggatttg

SEQ ID NO: 10168 - DNA, 201 bp, synthetic construct
  misc_feature 1..201: note = Description of Artificial Sequence: Synthetic polynucleotide
  source 1..201: mol_type = other DNA
ttttttagtttttagagtaagttaattagggatacgttttcgtggtttagttcggaaataatgtttggtgggaatttgtaattttggttgtcggaattttcggggaggattaacgtcggcgtatcgtgcggtcggggcggggcgtcgtttaaatttaggttttgtgatagcgattgtggcggtttggaaagcgtgggtttc

SEQ ID NO: 10169 - DNA, 201 bp, synthetic construct
  misc_feature 1..201: note = Description of Artificial Sequence: Synthetic polynucleotide
  source 1..201: mol_type = other DNA
aattatttttaaaataattttttcggggggtgagaggtaattataattttagcgagtggagggcgcgggggatgggcgtcgggcgggcgggggcggggagcgcggcgcgggtttttaggtggcgagcggaggtgttttcgtcgcggggggaggggcgggggcgtacgcggtcggcggcggggggaggcggcgcgcggggga

SEQ ID NO: 10170 - DNA, 201 bp, synthetic construct
  misc_feature 1..201: note = Description of Artificial Sequence: Synthetic polynucleotide
  source 1..201: mol_type = other DNA
aggttttcgtatttatcgcgtgggtttttgttttggttttatttgttttcgatatttttcgttttcgcgatgtttaatttcggttcgagaaggttggtcgcgatttcgttcggtattcgtcgtttcgatattattattcgttttttcgatttttttcggcgtcgttgtttattcgtttttcgtttcgtttatcggggtcgt

SEQ ID NO: 10171 - DNA, 201 bp, synthetic construct
  misc_feature 1..201: note = Description of Artificial Sequence: Synthetic polynucleotide
  source 1..201: mol_type = other DNA
ggggacgttcgtttttttttcgggtagttttttttatttaggcgggatttgggttttcgttggatttagggtcgttttttcgtaggcggggtcggttcggcgcgtattttgtttcggatgttttggcgtacggtttcgcgtttcgtttttattttggcgtatttggttttgcgtttttttttcgtttggcgtagcgttttt

SEQ ID NO: 10172 - DNA, 201 bp, synthetic construct
  misc_feature 1..201: note = Description of Artificial Sequence: Synthetic polynucleotide
  source 1..201: mol_type = other DNA
tattttttttttgcgcgtttgtttttttttcgtttgtaggatttcgtttttggttcgttttttttttttttgttgggtaggttttttcggagtttattttcggcggcggcggcggtagtcgcggtcgcggtcgttggatttcgagaggcgcggggaatttttttattttttgttttggttttatttgtttttttttttttt

SEQ ID NO: 10173 - DNA, 201 bp, synthetic construct
  misc_feature 1..201: note = Description of Artificial Sequence: Synthetic polynucleotide
  source 1..201: mol_type = other DNA
tagggaattataaaagacggtcggcggcgagtaggttggggtgacggggatttcgtggataacgggtttgaggacgtttagggttttagttttttttaggcgtttttcgtcggggtaacgtagagtagttgtcgtttttttcgcgttttagtagatggtggtgttagttcggtttcgtgttcggtcgtcgttgcgttcgcg

SEQ ID NO: 10174 - DNA, 201 bp, synthetic construct
  misc_feature 1..201: note = Description of Artificial Sequence: Synthetic polynucleotide
  source 1..201: mol_type = other DNA
ttagataggtatggttaaggtagtttgtgatttattttataaaattagagatttttgttttttgtggagtaagatttttcggaggttagagtaggatgatcgttaatttttttttttagagtcggtttagtttgataaagtaggggttatttcggagtttggaggggaagagagtttaggtataaggttatttttgggaaa

SEQ ID NO: 10175 - DNA, 201 bp, synthetic construct
  misc_feature 1..201: note = Description of Artificial Sequence: Synthetic polynucleotide
  source 1..201: mol_type = other DNA
gggcgcgcggcgttttttatttacgttcggtcggggcgcggcgcggcggcgggtattcggacggtcggcggaggtaggtcggttcgggtattagtttgggcggttcgcgggtcggggcggcggcggggtggcggtggcggcggtagtagcgcggagtcggtgggcgtagtcgcgcgttaggtcggcggtcggggtttgggg

SEQ ID NO: 10176 - DNA, 201 bp, synthetic construct
  misc_feature 1..201: note = Description of Artificial Sequence: Synthetic polynucleotide
  source 1..201: mol_type = other DNA
tttgttatagataagttttcgaagtcgttttggtgtaggttatttggttttttagtttttggtgtgtggttagtgtttggtgtttttggaaagttattttcgggtagtttttgatagtgcgattcggcgtttaagtagtttgggattttgcgcggatttgatttttttagatcgtaggtagtttgggaggaggttcggtcg

SEQ ID NO: 10177 - DNA, 463 bp, synthetic construct
  misc_feature 1..463: note = Description of Artificial Sequence: Synthetic polynucleotide
  source 1..463: mol_type = other DNA
acgtttgtgttgtatttggcgttggtcgacggcgcggtgttgttgtttacgtcgttttttgtggtttttttgattcggtaggtttggtcgttgggttaggcgggttgtaaggcggtgtattacgtgtgcgcgtttagtatgtacgttagcgtgttgtttatcggtttgtttagtttgtagcgttgtttcgtagttattcgtttttttttggcgtttcggttgcgtagttcggttttggttcgtcgtttgttgttggcggtttggttggtcgttttgttgttcgtcgtttcggtcgtcgtttatcgttatttgtggagggatcgcgtatgttagttgtgttattcgtcgtcggtttacgtcgtcgtttatttgagtttggagattttgatcgttttcgtgttttttttcgggttgatgttcggttgttatagcgtgacgttggtacggttgcggggcgttcgtt

SEQ ID NO: 10178 - DNA, 201 bp, synthetic construct
  misc_feature 1..201: note = Description of Artificial Sequence: Synthetic polynucleotide
  source 1..201: mol_type = other DNA
atcgggagtgtttagcgattttaggttagttcgggggaaagaagcggtcgtcgtcgtcgaggttttttggtttcgggatttcggcgttgtttttttttttcgtatttgttggggtgggttggagtcgtaatcgaatttcggtcgcggcgtttgtaaagtttttttttcgaagtttcgcggttttagtttattggcgttttt

SEQ ID NO: 10179 - DNA, 201 bp, synthetic construct
  misc_feature 1..201: note = Description of Artificial Sequence: Synthetic polynucleotide
  source 1..201: mol_type = other DNA
gttttatagtttcggttagaatttggtgggggacgcggggggggggtgtttgacggggagggggtatagttttttcgggttaatttttatatttttgtttcgtttaggcggggggtgagtcggggtgagtagtcggttttaagttggtcggttttttggaaagggagggttagtaggagaattgtagatttttttagtttt

SEQ ID NO: 10180 - DNA, 201 bp, synthetic construct
  misc_feature 1..201: note = Description of Artificial Sequence: Synthetic polynucleotide
  source 1..201: mol_type = other DNA
gggatcgttttaagtagttcgttaataacgtggcggtggtgaaggagttcgacggcgttaagttcgtggtgttgaggaagaagtttcggttttcggagttcgagttcgtatttttcggtttttcgggggtagcggtttagtcgtcgaaatttatttcgacggttttgtcgcggagcgtttttgtttcgggagtttcgtttt

SEQ ID NO: 10181 - DNA, 201 bp, synthetic construct
  misc_feature 1..201: note = Description of Artificial Sequence: Synthetic polynucleotide
  source 1..201: mol_type = other DNA
gtttttagaggtttagttttgttttttattatatatagttattattttattcgtttttggggttcggttgtttttttcggtgttttttaaatttttttttcgatttgggtgttaagtttatttatttttcggcgtcgttttcggtcgaatagttttttgtttttttttcgtttgggtcggagtttttcgtagtttttttcg

SEQ ID NO: 10182 - DNA, 201 bp, synthetic construct
  misc_feature 1..201: note = Description of Artificial Sequence: Synthetic polynucleotide
  source 1..201: mol_type = other DNA
ggttcggtttggggttgggttggggagcgcggcggttgcggttggggtacggggcggtcgggtgagttggtcggcgttcgttttttttatttagtgagtacggtagatatcggagacgcggggtttattttttcggttttttttcgattaagaaacgttaatttcgttttttattggttgcgtcgcgcgttatgtcgatta

SEQ ID NO: 10183 - DNA, 201 bp, synthetic construct
  misc_feature 1..201: note = Description of Artificial Sequence: Synthetic polynucleotide
  source 1..201: mol_type = other DNA
atcgagtttaaaagtcgtcggcggtatattttagcggttttttttttttcgggttgggattcgtttttgtaagaaacgttatgtttttttttttagatatcgtttcgggagttttagatgtaaaattagaggttttttatttggtattattgatttttgtgttaataaaatgttagtttttaagggaaaatttaaaaaaag

SEQ ID NO: 10184 - DNA, 201 bp, synthetic construct
  misc_feature 1..201: note = Description of Artificial Sequence: Synthetic polynucleotide
  source 1..201: mol_type = other DNA
gtcgcgcgggacggggtagggatttcgagaatatcggggatttgcgggtcggtggtttcgggtaggttatttttgacgcgggtgcgaggtttttcgcgggcgtgtacggttgggtcggagtcgcgtcgggggtcgggatacgtttggggttagcgttggcgtcgtcgttcgggtggggtgggtcgggttcgggtttagttt

SEQ ID NO: 10185 - DNA, 201 bp, synthetic construct
  misc_feature 1..201: note = Description of Artificial Sequence: Synthetic polynucleotide
  source 1..201: mol_type = other DNA
ggcggcgcgcggtagagttgggtttttcgttaggtggtcgggggtgtgtttttagggtattttattcgttattttcgcgtttttagtttcggcggtcgcgcggatttcgtttttgttgatttcggcgtacgttttcgcgtcgcgcgtagtttttcgtttttcgtcgatttcgtcgcgtcgtcggtagttttttttagtttt

SEQ ID NO: 10186 - DNA, 201 bp, synthetic construct
  misc_feature 1..201: note = Description of Artificial Sequence: Synthetic polynucleotide
  source 1..201: mol_type = other DNA
ttttttttttgttgttttaaaatatttttcgacgttagtaaaatataatgcgtttcggtcgtcgtaaatagtcgggagggagagtatatattcggcgcggcgcggtcgtcggttcggtttttatttttttttcgtttttagaaaatgttataaaagcgggtagggcgcggggagggcggttgcgcgttcggcggtcggggt

SEQ ID NO: 10187 - DNA, 201 bp, synthetic construct
  misc_feature 1..201: note = Description of Artificial Sequence: Synthetic polynucleotide
  source 1..201: mol_type = other DNA
agttaggaaatgcggggtttggtggggtgaggagtacggggttttttttttattttcgcggggattttgttatcggtttagtgtggaggttttatcgtttcgttcggattcgtggggtttcgatagtgtggtttttgcgaggattttttttatttttttcgttttggggttgttgcgggagggcgttcgggtagtattagg

SEQ ID NO: 10188 - DNA, 258 bp, synthetic construct
  misc_feature 1..258: note = Description of Artificial Sequence: Synthetic polynucleotide
  source 1..258: mol_type = other DNA
gcggcggtagcggcggtttggtttttttagagggttagagttagggatatgcgggcgttcgggatttcgcgtttcgcgcggttcggcgtttgagcgttttcgtttttcgtttcggagttgtcggcggtatgattcgatacgtcggggcgttcgcgcgcggggattttacggggtaagttcgggcggtcgtttttttttttttcgcgatttttacggttcgcgttttggtcgttttattttattttttgttttagagag

SEQ ID NO: 10189 - DNA, 201 bp, synthetic construct
  misc_feature 1..201: note = Description of Artificial Sequence: Synthetic polynucleotide
  source 1..201: mol_type = other DNA
tcgacggttaaggaaagtttattagtttttcgtatcgtgggcgacgggttaagattcggttttaaacggttagatttagtttttagtcggttgtcgttttcgttttacgtaggcgcgtttcggggttttttttttttttatcgcgcgttcgcggggttcgacgggggcggagcgattttcggaaggggcgtggcgatcggg

SEQ ID NO: 10190 - DNA, 201 bp, synthetic construct
  misc_feature 1..201: note = Description of Artificial Sequence: Synthetic polynucleotide
  source 1..201: mol_type = other DNA
agggggacggttagacgggatgtcggaagttaagggacgtagaggtcggcgggtggcggcgatggagaggatagattcggtttttagaggaggtcgtgagcgcggggtttgcgtcggtcggaggagggattcggggggttgtaatatggttgttcgggcgtcgttttttttttgttaagttagggttttggggagttgttg

SEQ ID NO: 10191 - DNA, 201 bp, synthetic construct
  misc_feature 1..201: note = Description of Artificial Sequence: Synthetic polynucleotide
  source 1..201: mol_type = other DNA
ttcgtcgcgtttcggtcgggatggatttatacgttcgatgagtttcgcgtcggcggttgcgagcgtcgagtttttttttgttgcggttttagtcgtttttcgcgcgttcggtttcgcggattaggatttttgggtttttcggttgagggcgcggtcgtttcggagaggtcgagcggggacgggttcgagatggcgcgggga

SEQ ID NO: 10192 - DNA, 201 bp, synthetic construct
  misc_feature 1..201: note = Description of Artificial Sequence: Synthetic polynucleotide
  source 1..201: mol_type = other DNA
tagttaggatagtataaaatttttttatcgtttattttttgtaaaaaatcgtggttttcggcggattttggagataggaggtgtaaagggcgtttatacgcggttcgggttcgcggtcgagagttggggggatttggagcggggtcgggtcgtaagaagattttgattttgtttcggcgttggggcgcgtgttaagggttc

SEQ ID NO: 10193 - DNA, 201 bp, synthetic construct
  misc_feature 1..201: note = Description of Artificial Sequence: Synthetic polynucleotide
  source 1..201: mol_type = other DNA
tgtcgggttcgacgtgtatagtttagcgtttttttttattagttattgtttaggtttttcgattttgtattcgtcggaatgagagaaagtagtttttcgtcgtttagttttcgggtagttgtttcggtcgggttttgcgttggtgagaaagttttatttagaggcggtcgcgcgtaattgtaggcggcgttttaggttcgg

SEQ ID NO: 10194 - DNA, 201 bp, synthetic construct
  misc_feature 1..201: note = Description of Artificial Sequence: Synthetic polynucleotide
  source 1..201: mol_type = other DNA
cgcgggtaaggaaagcgcgtaggttttgtagatttttttatttcggttttttggttcggttcgttttttcgtttcggggcggcggttttttgttttgtagcgagcgttcgtaggagggacgttaggatttcggacgttatttttgaggtttttttgtatttgggtttttgatagtcgggaataggtaggaggtggggcgag

SEQ ID NO: 10195 - DNA, 201 bp, synthetic construct
  misc_feature 1..201: note = Description of Artificial Sequence: Synthetic polynucleotide
  source 1..201: mol_type = other DNA
gtgggaggtcggtagcgcgggcgtcgcgttttcggaggagttcgcgttttttgaggagcgcgcgtgttcggaagagttcgcggcgtcgtttttcgaatcgcgcgtttggtttgaggatttcgcgtttttcgaggagttcggggagttcgcgttcgtattttcggggttcggggcggtgtacggggagtcggatttggtgtt

SEQ ID NO: 10196 - DNA, 201 bp, synthetic construct
  misc_feature 1..201: note = Description of Artificial Sequence: Synthetic polynucleotide
  source 1..201: mol_type = other DNA
agtgcggatttcggtcgcgtgcggttttgatcgcgtcgttttatttttggcggggttacgtacggacgttatggttggcgtcgcggagtcgggcgatgcgcgcggattttttcggggttttgattgtttttgagttttttttgcggggggcgtgcgcggttcgtttttcgcggcgttacgcggttttttttcggtcgggga

SEQ ID NO: 10197 - DNA, 201 bp, synthetic construct
  misc_feature 1..201: note = Description of Artificial Sequence: Synthetic polynucleotide
  source 1..201: mol_type = other DNA
gtttgcggagggtgggattttatagtttgtttatttgtttaggttgagatttcgtgttttagttttggatgttttacgggtttttcgtttcgggtagcggcgtacgggaggagaagattttcggtttgtagttagatttttttttgagattttttttagtttaggtttagagttttgggatttttttcgattttttttagt

SEQ ID NO: 10198 - DNA, 201 bp, synthetic construct
  misc_feature 1..201: note = Description of Artificial Sequence: Synthetic polynucleotide
  source 1..201: mol_type = other DNA
tcggttttttttttcgcggggggtttcgtttcgcgtttcgttttttcgggttgtagtcggtagtttacgtttagggagggtggagggaggaggagaggcgcggagaggagggaggggagaggggagggaggaaggcgagagaaagggagttgtttttatttcggattttttagagtttgtttggagcgcgtatttagcggt

SEQ ID NO: 10199 - DNA, 203 bp, synthetic construct
  misc_feature 1..203: note = Description of Artificial Sequence: Synthetic polynucleotide
  source 1..203: mol_type = other DNA
gcgagcggttacggggtggggagtaaggggcgcgcgggcggtaggtatggaacggacgcggcgtatttcgtttatcgcgggacgttcggacggcggtcggcgcgcgcggttcgtttcgagttcgagagggcggggagataatgtttgttcggcggggtagtttaggtcgtacgttttcgttcgcggatacgggtcgtttttat

SEQ ID NO: 10200 - DNA, 201 bp, synthetic construct
  misc_feature 1..201: note = Description of Artificial Sequence: Synthetic polynucleotide
  source 1..201: mol_type = other DNA
tcgtggagtcgcgttaggttacggggtttcggttagacgggagcgttagtttttttttttgtttcgatgtttttaaatttaggtttagttttttttttttcgattcgatgatatttttgggttttagaatgttgttgggggcgggagatcggagaagaagtaggtgtacggggaggtgggtgttttgttttttgcgaggag

SEQ ID NO: 10201 - DNA, 201 bp, synthetic construct
  misc_feature 1..201: note = Description of Artificial Sequence: Synthetic polynucleotide
  source 1..201: mol_type = other DNA
tttgggggggcgggtcggatttgaaggttataggtttttttttgcgtttattttttttgtaatttttatagtttttttcgtcgatttttttatgttttttcgtttttttgttcggcgttttttttcggtcgcgggttaattggttgtgatagttggagttttgggtagttgagcggtgttattgtaaattaggtaggcgtt

SEQ ID NO: 10202 - DNA, 201 bp, synthetic construct
  misc_feature 1..201: note = Description of Artificial Sequence: Synthetic polynucleotide
  source 1..201: mol_type = other DNA
ttggaagggcgggggcggtgatagcggtaggggcgggattcggaggcggggcgtttgtttacgtcgtttagtagcggagggaggcgcggttttagtttcgcgtttaggagtcgtataggcgttcggggtcgtagtaggagtttttttagggcgtttagcgttgtatttacgagtcgcgcgtcgttttcgtttagtgcgttt

SEQ ID NO: 10203 - DNA, 201 bp, synthetic construct
  misc_feature 1..201: note = Description of Artificial Sequence: Synthetic polynucleotide
  source 1..201: mol_type = other DNA
tcgtatttcgttcgtttgttttttatcggttaggttttgtcgggtcgtcgcggtttcggcgttttattttttttcgggttagcggggggttgggagggggcgaggaggaagggggtttttttttttttttttcggagggggtcgtagcggcggtttcggtttttttttttttttatattttttttcgtttttttttatttg

SEQ ID NO: 10204 - DNA, 201 bp, synthetic construct
  misc_feature 1..201: note = Description of Artificial Sequence: Synthetic polynucleotide
  source 1..201: mol_type = other DNA
tcggagggagggggtaaaggaagaaaaagaaagcgcgttcggaaagtcggtttgggttttgttaattattttgaaggtaaagtatttgtatttttttcgtcgaggttggttggcggcgtcgcgttggaggggaggaggttcgggaggaggaggagaaagagtagcgggaggattcgggttgggaggggagcgtagggttgg

SEQ ID NO: 10205 - DNA, 201 bp, synthetic construct
  misc_feature 1..201: note = Description of Artificial Sequence: Synthetic polynucleotide
  source 1..201: mol_type = other DNA
tcgtcggggagtcgtaaagtttgacggaagaggttgcggttttcgcgttttagtcgtcggttttcgagtcgtagtcgggcgtttttttgacgtagtcgcgcgttttgtcggttttattcgtttcgcgtacggatggtttttaagtggttcgtcgttaggtcggtaaatcgtttttttagttgttgtcgggcgtcgttcgcg

SEQ ID NO: 10206 - DNA, 201 bp, synthetic construct
  misc_feature 1..201: note = Description of Artificial Sequence: Synthetic polynucleotide
  source 1..201: mol_type = other DNA
gcggcgggacgttatttgcgatcgggattatgaggagttgttagattcgtggggtcggtaacgagagtagtcgcggtatttgttgagaggaaagagggagcggttcggcgcggttggggcgcggtagaggtttgttcgattttcggttatgttattgttttgcgtgcgcggtgagtgcgcggattgaggcggggaggcggg

SEQ ID NO: 10207 - DNA, 201 bp, synthetic construct
  misc_feature 1..201: note = Description of Artificial Sequence: Synthetic polynucleotide
  source 1..201: mol_type = other DNA
gcgttagatttttttattatatttttttattttaggcgattcgttttggtttcgggtgtttttagtttgcgcgggtcgtttttagttttcggtggatattcgtttttagttcgtcgttttttgttcggttttgcgttttttggaatttttgggtttttagttttcgtcgtttttagaattgcgtttgcgtaataatggtta

SEQ ID NO: 10208 - DNA, 201 bp, synthetic construct
  misc_feature 1..201: note = Description of Artificial Sequence: Synthetic polynucleotide
  source 1..201: mol_type = other DNA
aattattagagaatttttttaaaaatatagattcgatgaggagtggttttttcgttttttttttgtgtcgagaagggatttcggtcgttaataataaagacgtttttcgttttttttttttcgtcggttcgggttcgtttttttcgcgttgcggttttcggtttagcgtttttttttcgagtcgggttgcggcgtttttaa

SEQ ID NO: 10209 - DNA, 201 bp, synthetic construct
  misc_feature 1..201: note = Description of Artificial Sequence: Synthetic polynucleotide
  source 1..201: mol_type = other DNA
ggagggtcgcggagacgtaggcgtttcgggtcgttcgcgttgtttttgtttgtttcgtgcgggagtcggggtttttggttttttggttttttggtttttgcggttcgggcgaatttagagcgtattcgtacgtcggtttcggtcggtttttagcgttcgggttttacgggtcgcgtttttacgcggcgttttttagagatt

SEQ ID NO: 10210 - DNA, 523 bp, synthetic construct
  misc_feature 1..523: note = Description of Artificial Sequence: Synthetic polynucleotide
  source 1..523: mol_type = other DNA
ttgcgttaagttttagaattatttagtttcgtgtttgtcgttcggggttcggtttcgtttcggtcggcgtttatttggcggtgtcgttttcggaagattacggcgaaggtttcgtgttttacgagattttttttgttgtattcgaagttatttattatttttatggtcgcgttttcggggtatatagcggacgggcgggcggcgtagtgcggcgtaggtattagtatcgcggtttcgcgggttcggagcgcgttagcgtgcggcgggtttggggtagtcgtagtttcgggttcgggcggatttttatgtcgagagatcggagcggaaattggggaagttgtcgcgcggagttagggttagcgaggttcggttcggtttttgtcgtttatggttcggtttgtcgtcggtcgttggttgtttggcgaagcggtttcggcgttgtcgggttaggggtgtcgttatcgttattgtgcgcgtttagagtcgtatacgcgttttgaggtagtgaggggttcggtatttt

SEQ ID NO: 10211 - DNA, 201 bp, synthetic construct
  misc_feature 1..201: note = Description of Artificial Sequence: Synthetic polynucleotide
  source 1..201: mol_type = other DNA
cggttcgtattttttcgtcgttagttttagttttaaattcggcggtttagcgggcgtattatggtattggagtagcgcggggagcgcgttcggagtttcgcggttcgttgcgtttcgttcgggatttcgttgcgtcgcgcgtttttttcgcggttcgcggggtcgtttttgtatttttattttttttttcgtttgtcgtcg

SEQ ID NO: 10212 - DNA, 201 bp, synthetic construct
  misc_feature 1..201: note = Description of Artificial Sequence: Synthetic polynucleotide
  source 1..201: mol_type = other DNA
gttttcgtttaagtgtggtttttttgggtttatattttattaggttagtaaggagggggatagcggggggcggggtaggtgttgggatttcgggtaggtgcggggaaggtagggggcggggggggaaggggttgggcgatgtaggtgttgggggtcgggatagttgcgggggtaggtaggtatcgggaaggcgggagggcg

SEQ ID NO: 10213 - DNA, 201 bp, synthetic construct
  misc_feature 1..201: note = Description of Artificial Sequence: Synthetic polynucleotide
  source 1..201: mol_type = other DNA
cgtagattttgggtttcggttttgttatttagggggattttttttaacgatgggatcggtgttcggagtggagtatggggagtgcgttttcgggagtcggcgttggtcggatatgtgataattgtgggtcgttggaggttcgtttgcgttgggatagggtttggattttacgtgcgtcgtttgtgtttcgttagatcgggg

SEQ ID NO: 10214 - DNA, 201 bp, synthetic construct
  misc_feature 1..201: note = Description of Artificial Sequence: Synthetic polynucleotide
  source 1..201: mol_type = other DNA
gggtcggtttcgcggtcgatttggggtatcgcgtcggggtgaggtttggcgaggaggcgaaggttgtaggcgtgaggtgaaggtcgtaggtcggtcgggtcgattttcgttatgtaaatatcggtgagggggggggagggacgggggataagatggcggcggttcggcgtttgttgtaggggacgatagagggggttgtcg

SEQ ID NO: 10215 - DNA, 201 bp, synthetic construct
  misc_feature 1..201: note = Description of Artificial Sequence: Synthetic polynucleotide
  source 1..201: mol_type = other DNA
ttttcgcgtttttttcgcgttttatatttatcgttcggcggagggggtttagttcgtagtcgtcgtcgttatcgtcgcgtttcggtttcggtgtaggtagcggtcgtcgtcgtcgagatagttgcgcgggcgagtatttttacgtagtaagttcgtttttttttcgtttgtgcgcgcgtgtgtgtttttcgttcgtcggcg

SEQ ID NO: 10216 - DNA, 201 bp, synthetic construct
  misc_feature 1..201: note = Description of Artificial Sequence: Synthetic polynucleotide
  source 1..201: mol_type = other DNA
gcgggggttttttacgtggcggaggtttttcggtttgggggttacgggttcggaggaatttgtttggaagttttttattacggtagagttttttggagttcgtttcgtgttcgataaggggagttttagatttgatttttttagtagtttcgcggggcggggtcgagaaggggcgggcgggcggaggacgttggcgggaga

SEQ ID NO: 10217 - DNA, 201 bp, synthetic construct
  misc_feature 1..201: note = Description of Artificial Sequence: Synthetic polynucleotide
  source 1..201: mol_type = other DNA
aatgtgattatagttaatatatgatttttttagcgttttagttagtgttttttttgatttttgttttttggagaggaggatggaagggaggggttcggtacgttgttggtattttgttgtgttttgtagttttttttcgggatatttgggtttatatagttttttagtttatataattggtgtagattttttgtgtggaga

SEQ ID NO: 10218 - DNA, 301 bp, synthetic construct
  misc_feature 1..301: note = Description of Artificial Sequence: Synthetic polynucleotide
  source 1..301: mol_type = other DNA
tttttttttaatttttggcggcgggcggttggggaagtagttttgtggtttttcggcgggtgaggtcgagatagagattaatttttaggcggcgttttggcgttgagttcgcgttgaataagattttttcgtagttttgcgtttcgcgtcgggtgaaggggcgtgtttttgtaggcgttcggggttcggtttggagttggcggtcggtacgtcgtttttggcgttttttgttaattaagagaaatacggttaaatgagtgcgttgggatagaaatttatagttaattaaggttttattcgt

SEQ ID NO: 10219 - DNA, 223 bp, synthetic construct
  misc_feature 1..223: note = Description of Artificial Sequence: Synthetic polynucleotide
  source 1..223: mol_type = other DNA
gcgggggcggcggcggtcgtgagtttcgatgaggttcgagcgttttcggtcgcgcggtagcgttttcggttcgatggagatttcgtcgtgggatttagttcgtaacgattcgttgtcgtttacgttgatttcggtcgtgtttttttacgtgaagtttggttttatcgtcgtttatatcgtgttttacgcgttgtttttcgtgtttatttacgtgtagttttgg

SEQ ID NO: 10220 - DNA, 720 bp, synthetic construct
  misc_feature 1..720: note = Description of Artificial Sequence: Synthetic polynucleotide
  source 1..720: mol_type = other DNA
gatagtcgtgttttattttcgttttgtgttttttttttcggatagtgttttttttagggtttatttaggagggtgtagcggtggttttcggggcggtggtcgtggtgggggtgttagttgtaggggtgttttcggtgggtgggagttggtggtttttcgttggtgttatgggattcgtatgttcgttttgcgtttttcggtttttgagtttataggtcgggattttgtttgttagtcgcgtgcgttgtcgtttaatttttgtaggcgtagagcgcgcggcggcggtgatagagaattttgtttggttgtttaaatatagttttttgtagaaggattttgcgttcggggaaggggaggaatttttttttttttgggcgttcgtttttttcgttatggttcggtttttatattcgtttatatttggtcgtagcggggcgttcggggggaggggttgaggtcgcgtttttcgtcgttttttgggcgcgggttaggcggggaggaggggggcgtttcggtcgtgtgtttaggattgttttttagcggttattcgggttttagttttttaggtttggttttgataggcgggcggagtagttagtgcgagatagggaggtcggtgcgggtgcgggaatttgattcgttcgggaggcgggggcggggcgggggcgtagcgcgcggggaggggtcggcgttcgttttttttttttatttatttagttg

SEQ ID NO: 10221 - DNA, 1683 bp, synthetic construct
  misc_feature 1..1683: note = Description of Artificial Sequence: Synthetic polynucleotide
  source 1..1683: mol_type = other DNA
tagtggtagtgttgagtttaggaatacgcgcggagttcgcggcgattttcgcggtcgtttagttttcgcggcggatttcggcgcgtaggagttattgggtcgtaagggcgtcggggagcgggaggggcgttgggggcggtaaggggttttagattttaggttacgaattgtttttttttttttcgggtaagagtttcgttttttttaattgatagaaatttattggggtaggggggcgagtggggagagaggtcgtttagggttcgttattggttgcgtttttttcggttttggtttgggaagcggttttgggtttttcgggcgagtagtttgggcgtcggcgttttttgcgaggaagatcgcggggtgacggtcggtattcgttcggttgggtcgcgttgtcgtttcgatttatttttttttcgcgttcgcgtttttttttttttttttattaggagttcgggattcggagagggcgcgggaggtaggtatacgggttcgattttattttagcgtttatcggggacgcgggcgggcggcgacgggacgcggcgggggcgcggggcgggcgcggttatggagtagtagcggcggcggcggcggcggcggcggtaatattagcgatcgcgggcggacgagcgggcgggtagggtcgtcgggtttagcggatcgaattgtatagtttagtaaaagcgttttcgtttttcgcgcgtcgttttttgcgagtttaaatttattaatattttttaacgttttaatttattttttgaagaaaagtaaaaaaaaaaaaaaaaaaaaaaaaaaaagtaaaaaaagaaaaagtattgatcggagagacggggatatatatatatatatatatatatatatatatataaaattttttttggtttttgttaaaattagtagggttcgtcgcgcgtttgtgtgttagtgtgtgcgagtgtgtgtgcgtgcgggcgtgtgtgtgtgaatgtgattattttaggatttttcgggtttcggagacgttatttttttttttgatatttttttttataaatcggtggcgcggcggaggcggtagagtcgggcgggaagcgcggggtcggtcggggcgttcgtcgttcgtcgtcgttttcgcgcgttcgggggtttcggcgtttttcgagttagggcggttagttcgcggttcgtcgtttgatagatgtttatcgttatggagttgtcgtagtagtatttttgggggttcgggcgagcgacgggagtcgggatttgagcgagcgtcggggttagcggagtcggagtcgtcgggatatgggtgagtacgcgcggcgattttggttcgggagttcgggcgtttagttttttttcgcgtcgcgggttttcgtattttcggaatcgggggcgacgtgtgtgttttgtatgtaaaagtttacgtcgttttgttgggtttttgattttgtattcggcgggaagggggagatcgggtcgagggggcgggatgtcggttcgggcgaggttgtaggagatgggcgcgatttcggcgggtcggcgggtgggcggcgatgttggtttaattggagtggttcgttggtggcggcgatggtggaagttttgggttggagggttgggagtttattgagtttcgtttaatttgatttatttttttttcgtttttcgttttttgtattttttttcggt

SEQ ID NO: 10222 - DNA, 233 bp, synthetic construct
  misc_feature 1..233: note = Description of Artificial Sequence: Synthetic polynucleotide
  source 1..233: mol_type = other DNA
tttcgttcgggtcgttcggttcggttgtgttttgttcggttagggcgggcgggttcgtttttttttcggtcggcgttttttttttggtttttttttttttcgcgtcgttcgttttcgtttttttcgttttttcggcgtcggcgtagttttcgtgaattcgggcgtattatttcgggtgtttcggtttggggatcgttgtcgtttcggtcgttgtttttttaatttttttgttt

SEQ ID NO: 10223 - DNA, 213 bp, synthetic construct
  misc_feature 1..213: note = Description of Artificial Sequence: Synthetic polynucleotide
  source 1..213: mol_type = other DNA
gattgcgcgtgcgtagagtacgtcggcgcggtttcgggattttcgcgataattgtattgagataaagtgtggtaattcgagttggttggtgatttattttcggcgaggggttcgcgtgtgggttacgtcgtcgtttttatcgggaaagcggggattagtggggggggtttagttgtagggtagtgggaggatgttgtttgttttgggggaagg

SEQ ID NO: 10224 - DNA, 236 bp, synthetic construct
  misc_feature 1..236: note = Description of Artificial Sequence: Synthetic polynucleotide
  source 1..236: mol_type = other DNA
ggtagcgtcgtttgcgtcgcgtttagtacgaagagttcgttttagtttaggcgtagtagcgttatttggtcggttatcggtagttcggggaagaagggcgcgtggcgcgtttattttacggtgttgaagagtagtcgcgtcgttagttcgtatacgttgtcgatgtttagtatcgcgttcgtcgcgtcgttttttgcgtcgaagcgttcggtcgtcgtagggtagggtttagcgcg

SEQ ID NO: 10225 - DNA, 233 bp, synthetic construct
  misc_feature 1..233: note = Description of Artificial Sequence: Synthetic polynucleotide
  source 1..233: mol_type = other DNA
gagggtggggttttaaacgttatttaattagcgacgttgggttgggaattgtttaattaggtacgtagtttgagcggagaggacggttttcgggatgtggcgggatttgttcgtttttttgtttttggttgtcgttggaatttcgggtttcgtttttattgttttgtgttttttgtttttagaggtttagtttttggttttgtgatttgtaggtattgggaatttatagttaa

SEQ ID NO: 10226 - DNA, 737 bp, synthetic construct
  misc_feature 1..737: note = Description of Artificial Sequence: Synthetic polynucleotide
  source 1..737: mol_type = other DNA
aatgacgtcgtaaataatagtattaattattatcgttcgtagttttcgcgtatagaggttttaggttttcggttttacgtggatcgatttcgttcggtagcgcggggttattttatcgcgagtttttttcgtagttcggttcgggttatttcgattcgttaggtttaatttaataattataatatcggaaaaggaagtaaaggtcgaagtttattcgcggttttgaggtttgtgggaaacgtagtttaataacgaaagagttttgaagtttaagcggagttcgttggtcgtaggggtcgtattacgttttagattttggagttttcgggtgcgtagatttttgttattagtagaggttgtcgttgcgcgttttttaggcgcggaagaggcggttggtggtttttgacggtaaggtgaagtcgaggtagtaatcgggaatttaggttgggaggatagaatggggaataggaagttggggcgagggtggttttgggggaggtggggggtcgcggaattttaggtggtttttgttttatttttggaaagaatcggaagttcgggtcggggagggtgaagggagtcgcggattcggttgtttagtcgaggaggaaattcggattttaggttgagggaggtcgaagaaggaattggagggtcgggttgggaaggtttgaagcgggtatagtttttaggttggggagggtcgaggggagaattcggagtttgagtcgggcgag

SEQ ID NO: 10227 - DNA, 308 bp, synthetic construct
  misc_feature 1..308: note = Description of Artificial Sequence: Synthetic polynucleotide
  source 1..308: mol_type = other DNA
tttataggtcgagtttacgagtttttcgaggggtgagcggttcgggttttttggcgttttggtcggttagttaagcgttggattatattttttagaggtacggcgttcggagcgttggattatattttttagaggtatcgttttcggagcgtagttttattttcgttagtttgcgagatttggaggtttcgcgtggggagagggtcgcgtttgtggaggagtttggtttcgtatttgttgggttggcgaattcgaaattgggtttggaattcgggagttagattttggattttgaattgtatttttgt

SEQ ID NO: 10228 - DNA, 1100 bp, synthetic construct
  misc_feature 1..1100: note = Description of Artificial Sequence: Synthetic polynucleotide
  source 1..1100: mol_type = other DNA
ttggttttacgtagcgtttgtagattgtgagttcgtagggtagcgttatcggtttatgtagtagtcgtcggtagcgcgggtagtcgagtaggtcgcggggcgcgcggggtttcggggtcggttttttttcgtcgggcgtttcgggttcgtcgttcgggtttttcgcggatagcggtcggtcgcgtaggtttacggcgcgtattaggtcgttcgttagtttttttagttttttcggtcgtagcgtttcgagtcgcgcggcgtcgcggaacgcgtttagggtttcggggaggcggtcggcgcgggttagcgcgttttttagttttaggtataggtcgcggttcggttgcgttagttcggttagtatggagcgaaagagttcggttgttatttcgtagtcgttcgcgcggaaggtttcgtcgtttttttttaagcgttgggcgatcggtttcgcgcggtcgtagttaggatattggggcggcggcggcggcgggatcggttcggggtttattatcgcggggttgcgacgacgcgggttcggagcgaaggcgcggagtagggaggatgcgttgttgttgggaattggtcggcgggagcgcggttttagttttcgttagtagttacgcgcgtttgggggcggcgcgttgcgagcggttgagatcgcgggcgggggcgggcgtttggtttgggtagcgtttttagcgcggtgtgggcggcgagtttcgtagggttgtaatcgtttcggggtgggggtcgggataggtatcgcgggcgtaatttgagtttttgtttacgcgtagcggttttttagtttcgtcggtttaggtaatttaggtcgttgcggtaacgtagtgatcgcgttttaggttcgcgttttttgcgatgttttttttattcgtttgagggtttttgcgcgattgcgcgcgcgttttttgtttgtcgttttttcgtagaggtgtcggggttttgggagtaggtggttttggtcgcgggttgttggcgcgtcggtatcgcggtatttgtttttttttagaggtttggtcgtttttataatttgtggtttcgtttaagtaagaatttaggaaaagttattaaacgtatta

SEQ ID NO: 10229 - DNA, 214 bp, synthetic construct
  misc_feature 1..214: note = Description of Artificial Sequence: Synthetic polynucleotide
  source 1..214: mol_type = other DNA
ggcgagagtaaaaaaaaaaaaaaaaaaaaaaaaaaaaattttaattgtaaatattatttggaggtgggcgagggcgcggcgtgcgcgcggcggcgggtggcgggcggcgcgggcgtttttgcggggattttcggttttttagcgcgttttagtggacgttttgtttttcgttggtttttcgtgttcgttataatttgtaatatattattttttt

SEQ ID NO: 10230 - DNA, 582 bp, synthetic construct
  misc_feature 1..582: note = Description of Artificial Sequence: Synthetic polynucleotide
  source 1..582: mol_type = other DNA
ttttttcgcgtgcgtttcgtatttgtcgggggttcgtattcgttttcgtcggggttttagggggtacgacggtcgtggttcggcgtttttgggaggggagcgggatattttcgaaggcggcgcgttggaggcggggagcggtcggggcgtacggagagggcggggagttcgcgggagggggaggagggggaggagggggaggaggcgcgaggtgggggggagcgcggcgggcggtagggagggagcgggagggaggtaagaaagtagtagaaagtgaggttggtaggcggcggtaaaggagtcggcgcgcggcggcggtaggaagtttgtgttcgagaatagtagaaataagagttagggagggatcgcggtcgcggcggcggcggcgagagcgaaagaggaaattgtagaggaggaagttgcgtcgtagttcgagtcgttcggtattttcgtcgtttttgcgttcgcgtcgcgttttcggcgttttttttttagcgcgttttcggtcgttttttcgcgtcgcgttcgtcggttatggttcgggagaacggcgagagtagttttttttggaaaaagtaagtt

SEQ ID NO: 10231 - DNA, 203 bp, synthetic construct
  misc_feature 1..203: note = Description of Artificial Sequence: Synthetic polynucleotide
  source 1..203: mol_type = other DNA
ggcgatattcgcgttagttttcgggacggttgggttcgggttggtcgtcgattttcgattttttattagatgtttggtagagttcggcgcgttcggagttcgcgttttttagagggaaggggtcgcgcgtcgtcgcggcggttttgaggttgacggtcgggaggtgaaaggtcggagtgcggggttaggacgttttttggagg

SEQ ID NO: 10232 - DNA, 823 bp, synthetic construct
  misc_feature 1..823: note = Description of Artificial Sequence: Synthetic polynucleotide
  source 1..823: mol_type = other DNA
cgagttattcgtatttttttttaggagttatagttaggttagaagagtgcggagggacggggttcgggaagagtagggaatttttagagttcgtagttaacgcggaggtgggcgagcgggcgtgcgcgtatttatttgtcggcgcgagggagtgtcgggggggaagggagtggtttttaaaagggggaggggagaaggtagggggcggggagaagtcggttttttaggattcggttgcggcggcgagggaggaggaagaagcggaggaggcggttttcgcgttcgtagggtcgtgttatttgttcgttcgttcgttcgttcgttcgttcgttgcgtcgcgttgtcgatcgttagtatgttgtcgagagtgggttgtttcgcgttgtcgttgtcgtcgtcgtcgttgttgtcgttgttgttgttgttattgggcgcgagtggcggcggcggcggggcgcgcgcggaggtgttgtttcgttgttcgttttgtatattcgagcgtttggtcgtttgcgggttttcgtcggttgcgtcgttcgtcgcggtggtcgtagtggtcggaggcgttcgtatgttatgcgcggagttcgttcgggagtcgggttgcggttgttgttcggtgtgcgttcggttggagggcgaggcgtgcggcgtttatatttcgcgttgcggttaggggttgcgttgttatttttattcgggtttcgagttgtttttgtaggcgttggttatgggcgagggtatttgtgagaagcgtcgggacgtcgagtatggcgttagttcggagtaggttgtaggtaacgcggtttggaataagtagttg

SEQ ID NO: 10233 - DNA, 293 bp, synthetic construct
  misc_feature 1..293: note = Description of Artificial Sequence: Synthetic polynucleotide
  source 1..293: mol_type = other DNA
tcgcgcggtttttataatgtagggatttttttgagtggtggtcgttttcgttttagttttcggttattcgtagttttatatcgggttattggtttattatcgagatagttagcgagtttaggcggtttttgtagcgttgggagaggaatgtgcgcgaaattaattagagcgaaattagtcggaggagtcggtcgaggtgtaggtgtaggcgtagtttcgtttagaattttttcgttatatttaagggagttggaagttcgggagggtgttgttttttttttttaggaatagag

SEQ ID NO: 10234 - DNA, 262 bp, synthetic construct
  misc_feature 1..262: note = Description of Artificial Sequence: Synthetic polynucleotide
  source 1..262: mol_type = other DNA
cggacgcgttgattggttttaggggaagcgggaggcgagaataatggtttttttttttcgttaaaagggagcggttgtcgggttcggggatagggacgcgcgtgtagggcgtagagttgggtcgagtcgtcgtcggcgttacgcgagtttcgtagtcgtcgcgttcgggtaatgggtcgggggtattgagggtcgtcggggtcgagcgcggaggggggatcgagttagtgtcgtgttttcgggtcgcgttaatatgtttcgc

SEQ ID NO: 10235 - DNA, 240 bp, synthetic construct
  misc_feature 1..240: note = Description of Artificial Sequence: Synthetic polynucleotide
  source 1..240: mol_type = other DNA
tcgttgcggggtggagggattcgcgttttttagtttttcgggttcgggtcgcggggatcgtgcgcgcgtttttttttcgggtaaggtcgggcggcgggcgcgtcgcggtttttggggttttcgtttttttgttcgttatcgtttgcgggagtttttggtttggaggggttcggggcgcgttggcgattgcgggttcggcgataggggcggttggtggcgggaggatagtgggaggaaggt

SEQ ID NO: 10236 - DNA, 1240 bp, synthetic construct
  misc_feature 1..1240: note = Description of Artificial Sequence: Synthetic polynucleotide
  source 1..1240: mol_type = other DNA
agcgggtcggggtcgtcggttaagtttttgtttggggacgcggcggcgcgtcggagagtttcgaggttgtttgtatcgttttagagttttgggttgtgttcgcgtagggatcgggtcgggtagagtcgggcggggtggagaggtaagcggagcgcgcggtggggttgaggggaggcgtggggcgagtgttcgttgttcgttttttagtttttttgtttttacgttttttcgttcgtagtcgttcgtagttcggcggtgtagttgtgttggattcggcggcgtcgtagttttttatcgttttttgatgttattggggtgcgggggttcgggcggttcggtgcgcgggttaatagttgtacggttttcgcggtttagcggcgtagggcggggcgcgtttgatagttttttcgtttttcgcgttagttgattggcggttcgagcggtttcggagcggcggaggtttggcggagcgttggagcggagtgggacggttagtttgggtttattttcgtattttgtaggtttcggtttacgtacgttcgtttggagtgcgcgttttatttttaggttaaattatcgttttttttttttcgcgtattttttttttttagttttttttgtattttatttttatttcgtgttatttttaaggaggtttagaatgagcgtcgggataacgttttttgggttttttgtttttaagcggttttcgtttagtgggcgacgttttgtgtgttttcgcggtttttggtcgtgtgtgtcgtgcgtttttgtttttggagatttgcgcgtatttgtatgttggggagggcgggttcgaggtttcgagagttgtgtttagatttaatttttaattttaggggattttttttaggttaagcgagggttttttttggcgggtgtagtcgtagagttttgaggttcgattttattggtttcgtcgtttttcgcgtttattttatcgtataatgtttatagtgaaggcgacgggaaaagtagtagtttaaaggttttgaatttttttttttcgttatacgtacggaattttgagttttcggagtttcggggtcgaggtcggttcgggacggtgtttcgagtagttttttattgttggggagtcggttttgtttttgtttgaacgttttgtaacgattaagtagatttcggcgttagttcgtcgcggagaggtttaaataggtataaagtgcgattttaagtggttattgtgcgtaaaggcgtc

SEQ ID NO: 10237 - DNA, 222 bp, synthetic construct
  misc_feature 1..222: note = Description of Artificial Sequence: Synthetic polynucleotide
  source 1..222: mol_type = other DNA
gggcgatttgttgttttcgagtgtttttgggttgcgttttttttttttatttgggcggtcgcgttaagcgtagaggtcgcgggcgtttcggggttagaggcgttttcggttcgggttatggcgttcggcgtcgggggcgcgaggagcggtttatttagttagattttttatttcgttatcgttattagatattattatcgttgtgtagtgtgggtttttatt

SEQ ID NO: 10238 - DNA, 714 bp, synthetic construct
  misc_feature 1..714: note = Description of Artificial Sequence: Synthetic polynucleotide
  source 1..714: mol_type = other DNA
tttagggaaagtttttgaaagtataattcggaaaatttagtaatttttaaaaaaaaatggtttttcgttgttataagttttttttttaagatttagggttcgtagtagaatattttgatttaaaataaaaatattatgataaaaatattttaggaggtagtcggttttatttcgtttaaagtcggatttcgtttagtttcgtgaaagcgaaggagtattagcgttttttgatttcgtatagttttttcggtagagacggttcgttttttttaagaatcggaagtcggatagcgttaggacgttttattttttttatttgggatttagagaggtagcggttaaggatagggttttcgtcgaggttatcgggtagcgtttaggtttcggtttttgggaggggagtagcgggggaggggtacggggaggggcgagggcggggcgcgtttgggtttcggcgttgggttttttttttgttcgtttcgggggatatttataggatttttgtagatttttgtcgaggtaggatggaggtttgtagggatgtatcgcgggttcgcgattcgggcggtcggaatatagttttttttggtcggagatcggttcggtcgtgagtcgtgtttgtgttaggttttttacgttgtgttttagggttttagtgttcggcgcgtcgggggttgtatcgttagttatttggggtaggaaaaaggaattata

SEQ ID NO: 10239 - DNA, 1216 bp, synthetic construct
  misc_feature 1..1216: note = Description of Artificial Sequence: Synthetic polynucleotide
  source 1..1216: mol_type = other DNA
aagttttagaaacgttttcggaaagttttttttaatgggaagcgatttcgtcgttgagttaagcgttcgaattttttttttcgcggtagggatatcggttcgggttaggtttgcggaggacgttttcgggcgcgtatatatagttcgaggacgcgttttgtattttaagacgtagggtcggattttatttcgaaatttggtttttatagttttaggtcgaattgtgtttggtttttagttttcgagttcgagttttacgtcgtaaagagatggggttttattgtgtttagttggttttttagtacggacgtgtatttttttttggtttgttttttgttaaaaatcggtagtgcgtttcgtttttttgtttagtcgtagtttgtcgttttttagataaaaagcggcgatcgcggttcggttattcgagtttcgtcgcgttgcgtttttgttgggcggtttatagatggtgtttagtacggggtcgcgtcgagggcgggggcgggaggtcgcgaagagggtcgggcgggaggggaggagacggcggagtagttaattcgcgcgcggtttattagttgatcgtttttgtttatattaggtgtacgtcggttgcggggagtataaagcggggcgtatcgcgggcgtcggtaacgagtcggtgaacgaggcgaggttcgtgcgttcgcggttgtaagcgttcgtttggcggggagaggggtcgacggcgttagttcgggcggcggtatttttaggcgtttggggcgttttttttcggatttggtcgttcgttgtttcgttttttgtattttattttttcgatttttttttttagttttgtttttttttgttttggtttttgagagtcgattgagtttagtttcgtgtagtagcggttgtttgtgtcgtcgtttagttttcggttttggtgttttttcgggggtgttttaaggagttagtgcgcgttgcgggttgggaaggaggcgtcgtttagttagttttttttttttttttcgttttttttttttttttgttgttgttgtcgtcgtcgtcgtcgtgggtgtcgggttcgcgcgtattttaatatttttattagttgggtttcggggtaagtttttggtcggtcgcgtcgcggtaggaggtgtgggaggtagcgaggggaagtcgaggtaaatttggtggcgtgggagattttacggggtttggggaattttagggtaag

SEQ ID NO: 10240 - DNA, 207 bp, synthetic construct
  misc_feature 1..207: note = Description of Artificial Sequence: Synthetic polynucleotide
  source 1..207: mol_type = other DNA
agtttttcgtaaatttcgtttttttcgtttggtacggtttttttgtatcgttgtgtttcgtttttaggtttttgttcgttaagaatgtttgtttcgggggcgcgttcgttggttaggaatttgtcggtagttttcgggaatttttgaggatgcggaggtgggttcgagagttgcggtttcgatgtcggggtgggagttaggtaggtc

SEQ ID NO: 10241 - DNA, 253 bp, synthetic construct
  misc_feature 1..253: note = Description of Artificial Sequence: Synthetic polynucleotide
  source 1..253: mol_type = other DNA
acgtttagggataaattgggagtcgtgattgttaggtcgcgcggaggttgttttggtcgtttttgcggttaggtgaaggcgtagaggtagggaggtcgggcgagcgtaggcgggcggagagtagattacgcggaagaggtcgagagagaaagcggggtattcggtcgggggggttatttataagggacgttgggtacgaaggaggttggggcgaagatgagtttaggggttgggttgagagcgttgcgtagtc

SEQ ID NO: 10242 - DNA, 209 bp, synthetic construct
  misc_feature 1..209: note = Description of Artificial Sequence: Synthetic polynucleotide
  source 1..209: mol_type = other DNA
ggacggtttgtgagggatgcgtcgtttattgtttcgcgtcgtttgatcgttttcgtttcgattcgcggtgcgttatagtcgggttcgcggtcgttttcgtcgcgttgtcgttcggtcgtcgcgttcgcggggtcgcgttcggtacggttatgtggatttttacggaggaggagaaatacggcgtaggtaggtgaggtttaggtttggtc

SEQ ID NO: 10243 - DNA, 225 bp, synthetic construct
  misc_feature 1..225: note = Description of Artificial Sequence: Synthetic polynucleotide
  source 1..225: mol_type = other DNA
cgttcggtttcgtttcgtaggttgtaggcggttttggagggggcgttttcgtcgagcgcgcgtttcgcgtcgtcgtttcggattttttttcggcgtcgcgcgggtaggttcgattaggcggtcgcgggtttcggttttcggttagttttttagggttcgcggttcgtttcgtttcgcgcgttcgtttcgttgcgtaattcgatttaagttggaagtcgatcgtag

SEQ ID NO: 10244 - DNA, 1133 bp, synthetic construct
  misc_feature 1..1133: note = Description of Artificial Sequence: Synthetic polynucleotide
  source 1..1133: mol_type = other DNA
aaggagagttggaagggttcgtgtagtaggatagcgggcggaagcggggcgggcgagcgcggggtcgtcggtcggtagtcggagtagttgtcgcggcgttcgaatttcggcggtcgtcgcgttttttcgtttcgcggagatcgacgtaggcgttcgttttcgaggtcgaagggtattgggcggcgagggttgcggtagttggcgatttcgggggcgtttgcgcggcgcgcgttagacgaggttgtttcggcggttatttcgcgatttcgcgtcgtcgggatttgcgcgcggagaacgtcggttttggagggagtacgtttttttaaagtgtagaggagggttcggcggcgcgttttcgcggaaattttttttattgtagttatttcggatgtcgatttagtagtttgtttttcgagaaaagagaggggatttgggtagaagggtttcgtttgttttaaaagaaggtgtaaggattagaagataacgaaacgtttattttttgaagggtgggaaaaaaagaaaaagaaaaaggagttatttacgttggagatgttcgttttagatttttttatttttttttttttcgtttcggttttttttttcgaggtttatttaatttgttagagaaggaggaggagtagaagatgggggtcgaggaggaggggaagagaaagagaagtttgttaagaataaagtttttgtcggtaagcgcggggatttcgtagtggagggtattgcggagtttcggggagttatagcgggggtttcgggtttaaatgtttttgttcggagttcgagtcgatatatatatttagttcgatttttttttgttttcggttcgagttttttagtttggttcgtcggttcgtcgttttgtacgttttcgtcggttagttttgttaaagtaaagagttgcgttttttgagttcgttcggtcgaggggaggggacgtttcgagtttggtcgcgtgcgaggtttcgggcgcgttttggtttttcggttcgagagcgcgtagttcgggtttttttttcgcgttttgtttcgtaggtgagcggttgcgtttttttattgtttttttttttttcgcgtttcgtcggcgttgaaaagttatttatttgcgtcgtttttttttt

SEQ ID NO: 10245 - DNA, 478 bp, synthetic construct
  misc_feature 1..478: note = Description of Artificial Sequence: Synthetic polynucleotide
  source 1..478: mol_type = other DNA
cggttcgggaggcggaaggtcgcggatttgttcgatagaagagtagatgaggggagatcgaggacgttcgggttcggggagtttacgaggaggttaggatcgcggggtaaggaattcgcgggtagttattttcgttaggggtagggttcggttagttaggcgcgagaaggttaggcgaggtcgattgcgcggggtgaagacgttaggtcgatagttgcgggttttatcgttagttttgacgcgagtttgcgttttggcgacggcggagggcgggtagggggcgcgggcgttgttacggcgtttgtttagaatcggtcgggaacgtcgcgggcgggttttttcggtttttcgtttttttagttttgtttttaggttttcgttcgggttttttaagttgttagtcgcgttcgttttcgggtttttcgttttttttttcgcgcgtttttttttttagcggtcgtcggatttttttagttta

SEQ ID NO: 10246 - DNA, 201 bp, synthetic construct
  misc_feature 1..201: note = Description of Artificial Sequence: Synthetic polynucleotide
  source 1..201: mol_type = other DNA
tcgtacgcggagtttataagttgtttgtgtcgttattttttcggttttggtatcgttagtattttttaggaattttttaaattcgttttacggtgtagaacggtaattgtatcgagtttttgtgttaattagtattttcgtaatatcgttagtcggttttttttttgttataatatattaaaacgtgttaaaatatattaa

SEQ ID NO: 10247 - DNA, 208 bp, synthetic construct
  misc_feature 1..208: note = Description of Artificial Sequence: Synthetic polynucleotide
  source 1..208: mol_type = other DNA
gatgagcgtcgtgtagtatttttggttcgcgttgtttgttcgtgtcggttataggttgtaggttagtagggcgagcgcggcgagtcgggtagggttcgttcgtttcgcgtagtttatcgttttttcggtagtcgtcgttgttcgcggatcgggtttcggggtcggcgtttagaggcggggcgggcgcggttcgggcggcggcgggagc

SEQ ID NO: 10248 - DNA, 210 bp, synthetic construct
  misc_feature 1..210: note = Description of Artificial Sequence: Synthetic polynucleotide
  source 1..210: mol_type = other DNA
atttcgtatacgtgtataaggtgttgaaataggtttatttcgatatcggtattttttttaaagttatggggattatgaatttttttgttaacgatattttcgagcgtatcgtcggcgaggtttttcgtttggcgtattataataagcgttcgattattatttttagggagatttagacggtcgtgcgtttgttgtttttcggggagttgg

SEQ ID NO: 10249 - DNA, 229 bp, synthetic construct
  misc_feature 1..229: note = Description of Artificial Sequence: Synthetic polynucleotide
  source 1..229: mol_type = other DNA
tggtttatttgagtttaggggtttgagattaggatgattaatatggtgaaattttgtttttattaaaaaatataaaaattagtcgggttatggtggttgacgtttgtaattttagttatttaggaggtcgaggtaggagaattatttgaatttaggagcggacgttgtagcgatcggagatcgtattatcgtattttagttcgggcgagagggagattttgttttaaaa

SEQ ID NO: 10250 - DNA, 209 bp, synthetic construct
  misc_feature 1..209: note = Description of Artificial Sequence: Synthetic polynucleotide
  source 1..209: mol_type = other DNA
aggcgggggagagagatgacgttggcggacgtggttagcgcgggggtcgggcggtgcgttgtaggttatttgtcggcgttttgagatttaggagttttcgcgttttcgcgtgggttttatagggtcggtttatagttttaatatagtagttgaatttttttcgttgcgtttttttttttttggaggggaatgttagaagagagagagag

SEQ ID NO: 10251 - DNA, 255 bp, synthetic construct
  misc_feature 1..255: note = Description of Artificial Sequence: Synthetic polynucleotide
  source 1..255: mol_type = other DNA
gaaggggtttggagttttttttttggggtattgtgttgggattttgaggattggggattcggagggagggtaggcgtgtttttaattcgttgcgtcggaacggcgtttgatgagcggcgggttcggatacgaggggacggggtcgatttgtgggcggggttttggcgtcgtattaaaatcgcgtggggcggaggtcggtagaggtcgcgtagcgggtttagggtagggagtggttttgattcgttgcggaataat

SEQ ID NO: 10252 - DNA, 297 bp, synthetic construct
  misc_feature 1..297: note = Description of Artificial Sequence: Synthetic polynucleotide
  source 1..297: mol_type = other DNA
aggtttcgtttattcgacgtaatttgttcgtttttttttatttttcgaagggtggagtttgaggtttcgtttttaagcggttttttttcggagtgtttggcggttagtagggcggggtaggaggttgggagagggacgggtgcgggggtgggggagaggaagggagcggttacgtgtgaggggcggttcgaggttacgtgacggagcgtcggagcggagggagtcggggttgggagtttttttgagggaagaggagtggagtaggggggacgcggcggcggcgttgataatggtgag

SEQ ID NO: 10253 - DNA, 232 bp, synthetic construct
  misc_feature 1..232: note = Description of Artificial Sequence: Synthetic polynucleotide
  source 1..232: mol_type = other DNA
gtgagttggttggaaagagggggcggagtgcgcggagttagagtcgttatcgttgtcgtagttgtcgttattgcggcgtttgggttgagtcggagggaggcgggaggacgcgtaggggcggtcgtcgtcgtcgttaggttatcggggcgaaaatgcggtcgttgtcggaggttcgttaatttttcggggtggaagaggaggaggaggaggaggaaggggtttggagcgatta

SEQ ID NO: 10254 - DNA, 247 bp, synthetic construct
  misc_feature 1..247: note = Description of Artificial Sequence: Synthetic polynucleotide
  source 1..247: mol_type = other DNA
tcgcgttcgtagtcgcgtttttgttttttcgattttcgtatttttatttggttcggttttttcgtttttttttcggtttttttttttaggatatttgtgtcgttttattttttttattatatacgtattttttattttaattttttcgtttttttgttttttttttttcgtcggtttttttttttcgttgttgtttcgagagttcgatgtgggagggaaggcgcgggggaggggaggtcgcgaaggg

SEQ ID NO: 10255 - DNA, 292 bp, synthetic construct
  misc_feature 1..292: note = Description of Artificial Sequence: Synthetic polynucleotide
  source 1..292: mol_type = other DNA
gtttttcgagttttttgcggcgatttcgatttattttcgcgggtgcggggcgcggattcgttcggtttagtttttgttttttaggcgtttttttttttcgcgatttgtttcggtcgtattcgttttcgttttagtacgcgacgttgttcggcgcgatttttgttttttcggtttagttttatcgttgttttcgatttaattttagttgaacgttcgtagttttagttttattttcggtttagttttagcgtttttagttttattttcggttttagttttagttttagcgttt

SEQ ID NO: 10256 - DNA, 201 bp, synthetic construct
  misc_feature 1..201: note = Description of Artificial Sequence: Synthetic polynucleotide
  source 1..201: mol_type = other DNA
gtagttcggttaacggacgggttagttggttttttttaggggtagttttgttttttttttcgtttcgttttttttttttttattatatcgggttgtaattcgagtcgtcgagttattgtttttttttcggatttttttcggaggttttgcggttcgggttttcgcgttttgttgttttatgtagttttgagttttatagta

SEQ ID NO: 10257 - DNA, 201 bp, synthetic construct
  misc_feature 1..201: note = Description of Artificial Sequence: Synthetic polynucleotide
  source 1..201: mol_type = other DNA
ggttacgcgtgtttttggcgcgagtgtgcggggttaggtcgggagggcgtgcgcggatcgggcgtgtttacgcgcggtagggaggggttacgagggtgcgcgcgtttttggcgcgagtgggaagtgtggggattcggcgggttcggtgtgaggggcgtgtttttggggcgagagtggggagtgagtgtgaggagtaagggt

SEQ ID NO: 10258 - DNA, 201 bp, synthetic construct
  misc_feature 1..201: note = Description of Artificial Sequence: Synthetic polynucleotide
  source 1..201: mol_type = other DNA
gggcgcggtcgggtaggttggggggtaggtaggggtcgttttcgcggggcgggaatttcgcgtttttttttttcgagttttattttttatggtaaagcggcgtggggcggcggggcggagggagtcgagggggcggggagggcggacgggcggaggggacgggaggtttagcggtttcgggtttcgttggttcgggcgtcg

SEQ ID NO: 10259 - DNA, 201 bp, synthetic construct
  misc_feature 1..201: note = Description of Artificial Sequence: Synthetic polynucleotide
  source 1..201: mol_type = other DNA
attttttttttttatttttttttttttttttttattgttttttttatttttttttttttttcgtttttttttttggtttttttttttttcgttcgggattcggggggaggcgcgttgggtggttcggtagtcgggggcgggcggtagtttgtaggcgtaattggtatgtacgtcgttgtagttgagatcgtttaataaagt

SEQ ID NO: 10260 - DNA, 201 bp, synthetic construct
  misc_feature 1..201: note = Description of Artificial Sequence: Synthetic polynucleotide
  source 1..201: mol_type = other DNA
tcgttttcgttaaaggtttttttaaggggtcgttttagggtttcgtttcgtgtttcgtttcggcgtttatttcggcgttcgtttttttttttttttgttgcggtttcggtaggggttgttgcggcgatttaggttgttgcggttttagttttattagttgttgttgttttttaaggagacgtcgtcgatagcggagtagtg

SEQ ID NO: 10261 - DNA, 201 bp, synthetic construct
  misc_feature 1..201: note = Description of Artificial Sequence: Synthetic polynucleotide
  source 1..201: mol_type = other DNA
gtgcggtcggggcgttgttcggtagtgcggtgtttacgggattgataggtaggtaggtcgcgggttgggattcggatattaaagtaaaagtatcgttgggcgtcggaggagtcgcggggtttttattttttttttgattgatttttaaattttaatttgtatttttttcgtcgtttcgttttttttttttcgatttcgttt

SEQ ID NO: 10262 - DNA, 201 bp, synthetic construct
  misc_feature 1..201: note = Description of Artificial Sequence: Synthetic polynucleotide
  source 1..201: mol_type = other DNA
tatcgcgtcgtgcgttcgcgttcggtcgttaggtgttttagtagttcgatcgtcgagatgtttagttcgtcggggtttcgggcgttatggttttgcgtcgcgttgtgcgtttttcggagggtcggcggcgttttttagttcggttcggggtttatcgtttgttcggttttttgttattgttaggaggacggtattatgttg

SEQ ID NO: 10263 - DNA, 241 bp, synthetic construct
  misc_feature 1..241: note = Description of Artificial Sequence: Synthetic polynucleotide
  source 1..241: mol_type = other DNA
ttgcgcgttttggcggtaggaggcggggtcgggggcggggcgtgagttggtcggggcggggtttatggaggggcgggatcgcggcgttttataagtattgcggagcgaggcgcgcgttcggttagagagcgagcgcgtaacggcggcgacggcggcgattttatcgcgtattttgttaggttttcggcgtttagcgttttacgcgttttcgcgttttcgcgttttcgcgttttttttttcg

SEQ ID NO: 10264 - DNA, 201 bp, synthetic construct
  misc_feature 1..201: note = Description of Artificial Sequence: Synthetic polynucleotide
  source 1..201: mol_type = other DNA
ggcggtaggcggcgcggcgggttgggcgcggcggtggttaggtcggtgcggttgtagtttatgtatagcgtgttagggttgttttgttcgggtagtcggtcgtagcgtatgcggtcgggttaggcgaagtcgtattggcgtatgagcggcgcgtagtcggttttggcgcgttcgtatatcgagcggtagggcggtagcggt

SEQ ID NO: 10265 - DNA, 201 bp, synthetic construct
  misc_feature 1..201: note = Description of Artificial Sequence: Synthetic polynucleotide
  source 1..201: mol_type = other DNA
aagtggggtgaaaatgattttagtgaatagtttagttttttgggatagtggtttggtatttttgacgtgggagtggcgtttgttttgatttaatttggatcggtttagggataatatttttttcggagtagtcgttttgtttcgtttcgagtagtttagttgcgttttgtatgatcgaattggatattttttatttttttt

SEQ ID NO: 10266 - DNA, 201 bp, synthetic construct
  misc_feature 1..201: note = Description of Artificial Sequence: Synthetic polynucleotide
  source 1..201: mol_type = other DNA
ttcgcgtttgtttcgtattacggagtcgggtttttagagtagtaaggttattaggtggcggtgttggcgtagtaggcggagcgtcgggtgcgcggggtcgcgtttttggttttcgaaggtgatgaagatgggtttgcgggtgagttttagtagtcggtataggttttttttgcggggcgggatcgttaggggggtgggtgt

SEQ ID NO: 10267 - DNA, 201 bp, synthetic construct
  misc_feature 1..201: note = Description of Artificial Sequence: Synthetic polynucleotide
  source 1..201: mol_type = other DNA
acggttgggttttaggagatattcggaggggttcgcgggttcggttcggttttttcgttggggggttattagtcggtcggtagcgagatatttagaggttcgtttttttatcgcgttgttatagtaacggtttggtcggttgcgtttcgggtcgttcgttttatttcgcgggttcgttttgagttagtgattttagggatt

SEQ ID NO: 10268 - DNA, 201 bp, synthetic construct
  misc_feature 1..201: note = Description of Artificial Sequence: Synthetic polynucleotide
  source 1..201: mol_type = other DNA
tttagatggttttaattattggaggaaaaaagcggtttttttggtatgcgtgaaaagtcggagttgggagagtttgggaaaagttgtttgtatcgttcgtcggtttttaaataaatcgatgagttttttttttttttttagttttcgggtttcgggggagttttataaaatttaaatgaaatttaaagaagttatttttgg

SEQ ID NO: 10269 - DNA, 201 bp, synthetic construct
  misc_feature 1..201: note = Description of Artificial Sequence: Synthetic polynucleotide
  source 1..201: mol_type = other DNA
ttataaagtattagtggtgttttttcgaggaatttaagatttttcggtcggttgttaagtcgtcggaattttagtaggagaggaaggtttatttttttatcgtatggcgatgttcgggagattggagaagtttaggtaggtttggaagttaattttcggtatatagtagttttcgggaatgtagagttttagagtaagatt

SEQ ID NO: 10270 - DNA, 201 bp, synthetic construct
  misc_feature 1..201: note = Description of Artificial Sequence: Synthetic polynucleotide
  source 1..201: mol_type = other DNA
tagtagagacggggttttaatatgttgtttagggtggtttcgaatttttgagtttaggtaattcgtttattttatttttttaaagtattgggattataggcgtgagttatcgcgttcggtttgatagtttttttagaatgaagtttgtttcggaaaaaagagttttggttagtgttttttttggggattagcggaaagtat

SEQ ID NO: 10271 - DNA, 201 bp, synthetic construct
  misc_feature 1..201: note = Description of Artificial Sequence: Synthetic polynucleotide
  source 1..201: mol_type = other DNA
aggggagttgaggggcggagttatcggggcgcgttttcgcggttgcgttttttttcgtcggggagcgcgggtacgtaattcggagggtgttgggtcggttcggagtacgcgagtagcgggaggagggatcggggaatgattgacggaggcgggtcgtagaggtcgttgtgtttcgtcggttcgtattcggtcggagtgtgc

SEQ ID NO: 10272 - DNA, 201 bp, synthetic construct
  misc_feature 1..201: note = Description of Artificial Sequence: Synthetic polynucleotide
  source 1..201: mol_type = other DNA
ggttttcgttttttttgtaggcggattcgttcgtttttaggtcggattcgcgttcgggatagggattcggtcgagtcgagtcgtcgcgttagcgttgcgtcgtcggtcggtgcgtttagcggatcggagttgcgcgcggaatcgtgttgtttcgtttcgttttattcgtgagggtgagtacgcggcggcggtgcgcggggg

SEQ ID NO: 10273 - DNA, 201 bp, synthetic construct
  misc_feature 1..201: note = Description of Artificial Sequence: Synthetic polynucleotide
  source 1..201: mol_type = other DNA
cggggagggaggttttcggaatttcgagagagtattcgtgtttcgcgggtttcgtgtttcgttttcgggtttttttttttttaacgtaggggatttagttcggggtagtgtcgggtattggcgttggcgtttcgtttagttttgcgattttttttcgtttcgttttttttcgtttcgtttcgttttttttcgtttcgtttt

SEQ ID NO: 10274 - DNA, 239 bp, synthetic construct
  misc_feature 1..239: note = Description of Artificial Sequence: Synthetic polynucleotide
  source 1..239: mol_type = other DNA
agagggcgagcgagagagagatatatatatatacgtatacgtatacgtaggttatatgaatgggaggcggtagttaattttacgaggtcggcgagtcgcgcggcgtattggcgttgggagtagggtcgtatttcggcgcgggggggcgttacgtaggtgatgggcgttttttcgggggttacgcgcggtcgtttttttattttagtttcggtttttttgtttttttttttttttttttt

SEQ ID NO: 10275 - DNA, 201 bp, synthetic construct
  misc_feature 1..201: note = Description of Artificial Sequence: Synthetic polynucleotide
  source 1..201: mol_type = other DNA
tttttcgtttttatttatttttttttattttttttttttttttttcgttagtttcgtatttattttttttatttcgtaatttttttttgtttttatttatcggggttatggtcgtagaagaggtattgtagacggtggattattataagattgagatagagaggttaattaaggagtttacggagattatttacgagaaga

SEQ ID NO: 10276 - DNA, 201 bp, synthetic construct
  misc_feature 1..201: note = Description of Artificial Sequence: Synthetic polynucleotide
  source 1..201: mol_type = other DNA
ttgtcggggagaatatgtattaggtggttgatggttttgtggatgtggtggtttgtattttggtgttgtgttttgtgaagaattaggagcggatttttcgcgaggtgtgtagagtgttgagatcggtgagtgaaagggtgtgaggaggattagttagtagtagttattattatagagggtaggtttgttaattttaggtgg

SEQ ID NO: 10277 - DNA, 201 bp, synthetic construct
  misc_feature 1..201: note = Description of Artificial Sequence: Synthetic polynucleotide
  source 1..201: mol_type = other DNA
gaggcggaatttaacggaagtgaagaaaagattaacgggaaagaaggacgagtacgcggtttcgggatagatttttaaagtttttttttgcgttttttggcggtcggagggggagtagcgcggatacgtttttcggttaatcgttggttattaggttggagtggggtttttttttgttgttttttatgagattattgtttt

SEQ ID NO: 10278 - DNA, 201 bp, synthetic construct
  misc_feature 1..201: note = Description of Artificial Sequence: Synthetic polynucleotide
  source 1..201: mol_type = other DNA
gcgattacgggtttcggcgaagatgcgtcgtttgagcgttcgcgcggttttcgttcggggcgggcgtgatttttgttgaacggagattttttttttttttcgatttcggacggcgtaggtcggcgttaggatagtttttatcgatagcgtttttttttattcggagagaggtatcgatttttaaggagggtttcgttaggt

SEQ ID NO: 10279 - DNA, 201 bp, synthetic construct
  misc_feature 1..201: note = Description of Artificial Sequence: Synthetic polynucleotide
  source 1..201: mol_type = other DNA
tcgttttcgtcgttcggggtaggcgcgtcgatggcgtttttgaggtgacgtcgtttatatcgggttttttcgggggcggaggaaatatttatgaatttttcggtagttttttttgtcgggcgttaggtaagtagcggtttcgggcgcggcggggcgtcgcgggaacggtgtatattggtcgaaatttattgttttttaaga

SEQ ID NO: 10280 - DNA, 201 bp, synthetic construct
  misc_feature 1..201: note = Description of Artificial Sequence: Synthetic polynucleotide
  source 1..201: mol_type = other DNA
ttcgttatttggggcgtttggggggttttggggcgggggaggcgggggttttgtttaatttcgttattgttattatcggttaggtcgcggtttggtaattcgtgaataggaggtagggttgtagggcgtgagggatgatgataaggaagtcggaggagtagcggcggtagcggagagtttattttggatgtaaatggtagg

SEQ ID NO: 10281 - DNA, 201 bp, synthetic construct
  misc_feature 1..201: note = Description of Artificial Sequence: Synthetic polynucleotide
  source 1..201: mol_type = other DNA
atttcgcgttttgcgttttaattaggattgtttcgcgcgtttttgagtttcgggtttcggttcggatttgtagttttttaggtggttgggaaggtaggtgcgtcgttgttttcggcgcgcggcgtttcgcgaggtttttagttttcgttttggtggattttcgttgggtgggagtcgggagtggaggcggtcgttttaggg

SEQ ID NO: 10282 - DNA, 201 bp, synthetic construct
  misc_feature 1..201: note = Description of Artificial Sequence: Synthetic polynucleotide
  source 1..201: mol_type = other DNA
cgattcggtcgtgagcgtgtttcgttgtagttcgttgttcgttaggttcgggtggtagcgtaggatgtttttttggtttgcggagaagtatagatatcggcgggagcgcgttaatcgcgttcgtttcgtatcgcgtattcgagggggcgcgtaggtcgcgttcggtttttttgtttcgtttcgtttcgttcggttttaaag

SEQ ID NO: 10283 - DNA, 201 bp, synthetic construct
  misc_feature 1..201: note = Description of Artificial Sequence: Synthetic polynucleotide
  source 1..201: mol_type = other DNA
cggtttgggaaggtttcggtttttcggttgcggttttagttcggacggcgtcgcgtaattttgttatttttttggtttagtttcggttataggaggatttcgcgggtaacgcgcggagtttttggtatttttcggcggtgttttttgttgtttgttcggggatcgatttcgtatgtttttaggttgatttgtttaagttcg

SEQ ID NO: 10284 - DNA, 201 bp, synthetic construct
  misc_feature 1..201: note = Description of Artificial Sequence: Synthetic polynucleotide
  source 1..201: mol_type = other DNA
gtaatttcggcggagtcggcgtttttgggtatttttggttttcgcgtttcggtcgtacggtgattattcgggaggggatttcgggcgtttcgtaatttttcggttttcgtgggttttcgggtcgtttcgtttttcgtcgtcgcgtatttttcgcgtttttcggttttcggtgtcggttttcgtttcgcgtagtttcgagtt

SEQ ID NO: 10285 - DNA, 201 bp, synthetic construct
  misc_feature 1..201: note = Description of Artificial Sequence: Synthetic polynucleotide
  source 1..201: mol_type = other DNA
aggaagttcgaggtcggggcgttattttaagggttttttcgtttttttttcgagggtagagaggcgttcgcgttcggacgtattgcgggaatatttggagcgtcggcggagttcggttgttttcgcgggagggagttcgacgcgtatttttgggattcggattcggcgttcgcgtttcgggacggatttttgtttcggttg

SEQ ID NO: 10286 - DNA, 201 bp, synthetic construct
  misc_feature 1..201: note = Description of Artificial Sequence: Synthetic polynucleotide
  source 1..201: mol_type = other DNA
tcgtttgtaggttgtttcgggtcgagtcggagcgacgttgtcgcgtatttgggtagttttcgggggtcgcgttgtgttacggtcggggtcgttgcgattgcggcgtttgtatttgttacgtgattgagtcgggtatgtttttcgggtttttgtgtgagtgttatgagtgggtgtgcgagatttacgacgggagtatttgtg

SEQ ID NO: 10287 - DNA, 201 bp, synthetic construct
  misc_feature 1..201: note = Description of Artificial Sequence: Synthetic polynucleotide
  source 1..201: mol_type = other DNA
tacgtttggggcggtcgggggcggggtttggttggaattgacgcgtggagtttcggtggagggggcggggtttggttgggtcgttgtttatagcggttttcggggtttggaggttacggggttcggaggttacggggttcggaggttacggggttggttgtgtggggggtttaggggcgtagagtggttaagtagcggttt

SEQ ID NO: 10288 - DNA, 201 bp, synthetic construct
  misc_feature 1..201: note = Description of Artificial Sequence: Synthetic polynucleotide
  source 1..201: mol_type = other DNA
ggttttgtagttttgtagcgttcggggcggtgtaggagtttcggggtgtcgcggcgttcgttcggttgtatcgttggtttttcggttcgggttttaggttcggcgttttttatttttaggtcgcgcgcgtttcgttttttcgacgatttttagtttcgggttttcgttatttacgagttttcgttttcggtgagttgttgt

SEQ ID NO: 10289 - DNA, 201 bp, synthetic construct
  misc_feature 1..201: note = Description of Artificial Sequence: Synthetic polynucleotide
  source 1..201: mol_type = other DNA
gcgttttcgggggttgcgtcgtgtcgtttgttgtgcgcgcgtagaggtcggatagttcggttgcgggaagggattcgagcgtagggtttgtttcgcgtttcggaaagtgtttagtttgcggagtcggaggttgagttggggtagatcggcgttagacgggggtttgggtgagatacgagttgggggtgcggtttgtagaat

SEQ ID NO: 10290 - DNA, 201 bp, synthetic construct
  misc_feature 1..201: note = Description of Artificial Sequence: Synthetic polynucleotide
  source 1..201: mol_type = other DNA
ttttttttattattttttcgtttttttattttttttttttttttgttttgtaggattgagtagttaggcgcgagcgaaaataaatagttggggttgcgagcgttttcgtttcggtttcgagagtacgtcggtttagttttttatttggggcgttcgtttgtttattatgaggaagattcgcgttaatgttatcgttatttt

SEQ ID NO: 10291 - DNA, 201 bp, synthetic construct
  misc_feature 1..201: note = Description of Artificial Sequence: Synthetic polynucleotide
  source 1..201: mol_type = other DNA
gttcgtgtcgttgttgttggttttagcgttcgggttttcggtgagtgcggttttgtttcggttttcggaggaatttgtaggggagtcgggggcggggacgcgcgggttcgtaggtaacgtttttaggaaaggggcgatgttagggaagttgggttgggaggaggcgagttcgtatcgttgagtttttttagaaagggttgg

SEQ ID NO: 10292 - DNA, 201 bp, synthetic construct
  misc_feature 1..201: note = Description of Artificial Sequence: Synthetic polynucleotide
  source 1..201: mol_type = other DNA
cgttgggcgtcgttcgtcggtttaggcgcgcgaatttggcgtttttagtgaattattcgcggttcgggcgttcgggttcgggatcggtttttttttttttcgttgagtcgcggtcgagttggttttttgtattttatttagcgtcgtcgggacgcgattatatcgagatggtatcgagttttttttaaaggtttcggtttg

SEQ ID NO: 10293 - DNA, 201 bp, synthetic construct
  misc_feature 1..201: note = Description of Artificial Sequence: Synthetic polynucleotide
  source 1..201: mol_type = other DNA
gttttagtttttgggtcggaagtttttttttttttttcgtcgtagtttttttttagttttttttttttcgtcgatgcgggaaatttttttcgtttcgtttcgttttttttttttagttgtattttcgttcggttttttcgtttagtttttaatttaggtttcgtttttttttatttatttttcgttttgggtcgggttttc

SEQ ID NO: 10294 - DNA, 201 bp, synthetic construct
  misc_feature 1..201: note = Description of Artificial Sequence: Synthetic polynucleotide
  source 1..201: mol_type = other DNA
gatggcgacgcggatttgtatcgtcgttttgggttcgggtcgagttttttcgtcggattgggttatggttcgcgggattgcggcgtcgtcggggtttttacgtcgtaaggtttagttagtcggtcggtagcgattgcgacgagggggcgggggcggtgcgagcgcgtttgtcgttcggtttaggggagggataggggtcgc

SEQ ID NO: 10295 - DNA, 201 bp, synthetic construct
  misc_feature 1..201: note = Description of Artificial Sequence: Synthetic polynucleotide
  source 1..201: mol_type = other DNA
gtttgtttcgtcgttcgggttttgtggttggttattcgcgagttcgtttcgttttttttgtttcggttcgttcggttcgtttcggggttttcgtcgtaatcgagcggagtttagcgattcgtcgggtttatattagcggtcgtttttttcgaagcgtttttcggtagcgttcgggttttcgcgtttcggaatatttatgaa

SEQ ID NO: 10296 - DNA, 241 bp, synthetic construct
  misc_feature 1..241: note = Description of Artificial Sequence: Synthetic polynucleotide
  source 1..241: mol_type = other DNA
cgcgttggttcggtttttagttttttcggtcgtcgtttttcgttcgtcgcgtcgcggcgttaggagggcggggtcggggcgcgcgtcgttttttagtaagcgggcgggcggcgttcggtttgagggagcggggcggttttcgtcggcgtcgcgcgcgttgtgtgtgagcggggtcgcgcgcgcgcgcggtaggcgagtgagggaacgaggagcggtcgggtgtgagtgtgtgggagtgaga

SEQ ID NO: 10297 - DNA, 201 bp, synthetic construct
  misc_feature 1..201: note = Description of Artificial Sequence: Synthetic polynucleotide
  source 1..201: mol_type = other DNA
ggtgttaagcgtggggcgcgggttcgcggcgggagttgttcgcgaaatttagtgttgaagtaggcgcggacgtgttcggtgtttggcgcgtggtagtaggcgttcggtgtttcggtcggcgaagattatggcgtttatggtgaagattatggtgggcggttagttgaagaattttattgggagtttgggaggcggcgagga

SEQ ID NO: 10298 - DNA, 201 bp, synthetic construct
  misc_feature 1..201: note = Description of Artificial Sequence: Synthetic polynucleotide
  source 1..201: mol_type = other DNA
gcgcgggacggagttttatgaaagttggaagaagtgattataaatcgggattcgattttcgtagttttggcgttcgtttttttacgtaggttcgggatgtcggttttagtttttagatgtcgggaagacggcgtcggttagtttaaggaagagtttttaggaggttggggagtaagggtgtcgggttttttatgtcgggtt

SEQ ID NO: 10299 - DNA, 201 bp, synthetic construct
  misc_feature 1..201: note = Description of Artificial Sequence: Synthetic polynucleotide
  source 1..201: mol_type = other DNA
ttttgttggttagagtcgggtacgggtcgggcgggcggcggggatcgtgatcgcggttgcgtgcgttcgcgttcgggcgtttttgtgcggggttttggtacgtcggcgggggcgattcgggtgtcggttcgtgcgggcgatacgcgcgtttttgcggggttgcgcggggttcggagcggttgggggttttttgtcgggcgc

SEQ ID NO: 10300 - DNA, 201 bp, synthetic construct
  misc_feature 1..201: note = Description of Artificial Sequence: Synthetic polynucleotide
  source 1..201: mol_type = other DNA
tagatttcgtcggtcggcgcgttattcgcgttagtattatggatagcggtcgttttagtcgcgcgtttagggttaggttcgggttggtttttatcgcggacggttgcggggtcggggtagtttcgtaattttaaatttcggtagttttcgtttagtagggaggggtttcgggggcgaagagtgggggagaagtcgggaagg

SEQ ID NO: 10301 - DNA, 201 bp, synthetic construct
  misc_feature 1..201: note = Description of Artificial Sequence: Synthetic polynucleotide
  source 1..201: mol_type = other DNA
gtgtgagtttcgggggttcgggtcggcggttttgttagtcgggtcgtgcggttgcgggggtggggcggcggcgtcgttgttatattagtttcgggagcggcgagagggaggttggggtgggggcgcgaggggggcggcgcgaggggggtcgattttgcgggtaggtgatattatatttcgaaggttttagtgcgcgggcgg

SEQ ID NO: 10302 - DNA, 201 bp, synthetic construct
  misc_feature 1..201: note = Description of Artificial Sequence: Synthetic polynucleotide
  source 1..201: mol_type = other DNA
gtcgcgttatggtgagtcgggcggggtaggtcgcgcgttcgggtcgggcgggggcgtcggggttcgggggcgggaagggggaggttaggacgaggaggggcgcgcgcggcggcggggtcgggtcggggtttgcgggcgggggaggggcggttcggcgggcgcggttcgggggagggttcgttttaggggtcgcgttcgcgg

SEQ ID NO: 10303 - DNA, 201 bp, synthetic construct
  misc_feature 1..201: note = Description of Artificial Sequence: Synthetic polynucleotide
  source 1..201: mol_type = other DNA
taatcgggtattttcgcgcgtatacgttcgtgtttacgtgtgtacgtttatatttttgtatatatttaggcgcgcgttggtatatttattcggagaatttcgtatatatacgtattcgtaaatacgcgggttttttgcgttattaggaagtagtcgttagaatcgtcgggtgttttttaattatttttgggagatttggtt

SEQ ID NO: 10304 - DNA, 201 bp, synthetic construct
  misc_feature 1..201: note = Description of Artificial Sequence: Synthetic polynucleotide
  source 1..201: mol_type = other DNA
atacgatatggttaagcgtcgtcgttcgaatcggtcgtcgtcgatatttcgtttcggttcggggttgaggaggaagtcgagaaggaggaggaggaggcggcggcggagggcgggggaagaggacggtcgtttcgggtttcgtttgagttcgtagggtaggacgagggagcggcgcggtgagagaggcggatgaaggcgagg

SEQ ID NO: 10305 - DNA, 201 bp, synthetic construct
  misc_feature 1..201: note = Description of Artificial Sequence: Synthetic polynucleotide
  source 1..201: mol_type = other DNA
cgcgtatagcggcggcgagtgggtcgtgtacgcggatgcggggtgggagtgggggcgtacgcgcgggcgtgggcgagcgggtttcggtagtgtatatatacggtaggggcgggcgatagatgtagtgcgtgcgtcggagtttaagcgtataaacggaaagagcgggcgcggtgcgtaggggcgggcgtttagcgggtttgg

SEQ ID NO: 10306 - DNA, 201 bp, synthetic construct
  misc_feature 1..201: note = Description of Artificial Sequence: Synthetic polynucleotide
  source 1..201: mol_type = other DNA
ttttaggggagttaagtagttcgtttgaagttttttatttggaaatgacgtgtttaattcggcgtttttgtagtttcggtcgtttttttttgtttaatttcgcgtttttttagtttcggtcgtttttttcgtcgtttttttttcgcggtcgtttatttttgagatttttggttttattgagacgtttagttttattcggta

SEQ ID NO: 10307 - DNA, 219 bp, synthetic construct
  misc_feature 1..219: note = Description of Artificial Sequence: Synthetic polynucleotide
  source 1..219: mol_type = other DNA
ygtttgtttygtygttygtatyggtttagttttyggygttygttygtttttttygttyggagygttgtgagttaggagtagtygtaggtttttyggaygygttygtygygygtattaygtggttyggaggyggtygttagtttgygttygygatygggggyggaygttgtattatyggttyggagttgggtaggggaggtttttygttttttttttagg

SEQ ID NO: 10308 - DNA, 315 bp, synthetic construct
  misc_feature 1..315: note = Description of Artificial Sequence: Synthetic polynucleotide
  source 1..315: mol_type = other DNA
gaygttttttagagayggygttggtttttttyggyggggttggyggyggttgggggatgttagtygggygggtygygggtygtttttttttataggtttygagagyggggyggggttgggggygggyggggagttgtttygggtggtttygtttttagtayggaggatttttttygygaggygtygtygttttggagtttygtttayggygttygayggtyggggaaattgygggagttgggygtttagtgggggaaaaygagtygyggaygygaaggggygggatgaggttttyggggyggggttyggggttyg

SEQ ID NO: 10309 - DNA, 201 bp, synthetic construct
  misc_feature 1..201: note = Description of Artificial Sequence: Synthetic polynucleotide
  source 1..201: mol_type = other DNA
ygygtygttttagygttttgtagyggaggygtygtttttatttygatygtaggttygttygggtygttygttygtygggtatygagtygttttgtygygygttgygtttyggggyggggtgggaggagagggagtagtygttattttgtttaggtygtygygggttagttttgtagttagttttagttttgggtygggtgt

SEQ ID NO: 10310 - DNA, 201 bp, synthetic construct
  misc_feature 1..201: note = Description of Artificial Sequence: Synthetic polynucleotide
  source 1..201: mol_type = other DNA
gttyggagyggtygtgaggggyggayggggggtttyggggygggtttgtaggttttggggatttgaggttgtygggaggggttgttagggggygttggtygggygtygggttttgyggagttggggygtygatttttgattygygagaggggygttttygtygtgttggtygtagttgttatttttagygtttttattatt

SEQ ID NO: 10311 - DNA, 201 bp, synthetic construct
  misc_feature 1..201: note = Description of Artificial Sequence: Synthetic polynucleotide
  source 1..201: mol_type = other DNA
yggyggtgattgyggtttygygygyggttyggtttaggtaggattygaagygyggtttygggyggyggyggyggyggyggyggygtggtttygttygggygggttttgygggataagayggggagtyggttayggggtggggygattggygtttygggagtaggaggagaatygygggtaggygggyggggagggtgygyg

SEQ ID NO: 10312 - DNA, 201 bp, synthetic construct
  misc_feature 1..201: note = Description of Artificial Sequence: Synthetic polynucleotide
  source 1..201: mol_type = other DNA
aagtttttygtttagttttgtyggttyggtttgggygttgtggatyggtaatagtagttttattaggatgtaggtyggattaagtttttggggaaaattygttgtaataattgttttttatatataatttttaattttttttttattttygtttttaattyggagatttgtaaagtttaagaaagggaaaagtaattttat

SEQ ID NO: 10313 - DNA, 201 bp, synthetic construct
  misc_feature 1..201: note = Description of Artificial Sequence: Synthetic polynucleotide
  source 1..201: mol_type = other DNA
tagtatygtttyggtttygygttaggyggygggggaggggaggagggatttttttaggggtgggtttggagggggtgggggyggttttttttttygtttygtygygggtttattgttygggaggggyggggagatagtggggggtagtttygggygggagtggaggyggagatgtygtygtygtagtygtygyggtggttg

SEQ ID NO: 10314 - DNA, 201 bp, synthetic construct
  misc_feature 1..201: note = Description of Artificial Sequence: Synthetic polynucleotide
  source 1..201: mol_type = other DNA
ttttatgaygtygaattgtttgggggatygttagyggtgygtyggtyggagttagttggtggyggggygggyggttyggagtgtttgtttaattttgagygttygygagggggaggggaggtagttggttaygggttagggggtagtaaggtggaggagygggggttgggaaaggggagggtatttttygggttgtttgtt

SEQ ID NO: 10315 - DNA, 201 bp, synthetic construct
  misc_feature 1..201: note = Description of Artificial Sequence: Synthetic polynucleotide
  source 1..201: mol_type = other DNA
ttttttygttttagttagayggggygttygygttttttttttygtttygygttggtttttaataggaagtygtttyggtttttagtaygtgatttttatygtatttgtatatyggagggygaattggttaatyggtattttgtatttgagtttttttttygygygtttttttyggtttattggtttttyggttaggttayg

SEQ ID NO: 10316 - DNA, 201 bp, synthetic construct
  misc_feature 1..201: note = Description of Artificial Sequence: Synthetic polynucleotide
  source 1..201: mol_type = other DNA
gtygttatygttatygtagttgtagygtttttttatatttttagygygtygtyggtygggtagtttggtygyggtayggaggaggggttttggagggggyggtygggggaggygaygtygagttatygttttygggtagtygtygtygggggggagygyggagatttgaaagggygygtygggtaaygttttttttttttt

SEQ ID NO: 10317 - DNA, 201 bp, synthetic construct
  misc_feature 1..201: note = Description of Artificial Sequence: Synthetic polynucleotide
  source 1..201: mol_type = other DNA
ttattgttttttgggyggtgtggattagttgtagagtgtgatttgyggttagggagtgttttttyggagttttygtttttagatttttggtgttaaagaygttttgtgagygggtggggtygggygttttagttayggyggtygtygtttttttttttygtaggaygggatagygtttttgtggatygygttttagatggg

SEQ ID NO: 10318 - DNA, 201 bp, synthetic construct
  misc_feature 1..201: note = Description of Artificial Sequence: Synthetic polynucleotide
  source 1..201: mol_type = other DNA
ygtggaggygataggygtyggygataattttttagttygggygtygygygtygtttygygggaygygtattggggatttyggtygtttttttygtttttygygyggatataaagttyggtagtygyggygtttagagggtygagggttatyggatagttygggtagattttggattygtttygygggagttgtttttttgt

SEQ ID NO: 10319 - DNA, 243 bp, synthetic construct
  misc_feature 1..243: note = Description of Artificial Sequence: Synthetic polynucleotide
  source 1..243: mol_type = other DNA
aaggttggagggtgttagaaagatgatyggtygggtayggagyggggagttyggagtygygygtggggaggggaggtggaggagggggygtygggggagyggggggygygtgaggggtgygagyggggttyggggggygygyggtgggtgtggggggygtygggtttatttatttttygttagygtygttattgtyggttatatgattgaggttgttgttgggatgayggttygggttttagt

SEQ ID NO: 10320 - DNA, 201 bp, synthetic construct
  misc_feature 1..201: note = Description of Artificial Sequence: Synthetic polynucleotide
  source 1..201: mol_type = other DNA
ttttgtatttgtaatttttyggggtagtgatatagttggtttyggtgttttggyggagggtagaagtgatggtyggttgyggttttgtagggtgagaatygggttagataagtgagtgttttagagtyggggagttgtatayggaggggagggagtggygggygttgygtygggtttttttaggaagaggtgagygggttg

SEQ ID NO: 10321 - DNA, 201 bp, synthetic construct
  misc_feature 1..201: note = Description of Artificial Sequence: Synthetic polynucleotide
  source 1..201: mol_type = other DNA
ygaatgtggttaagggggtygtttagatgggtgtagatayggttaagatygtgttgatyggtattaaggatattgtttgtagtggggttatyggtgttgygaaygtggttaagggtgttgtgtaaattgggttgaaaaygatttaaaatatygtaataggtataaagaatatttttggtagtggggtgatyggtgttgyga

SEQ ID NO: 10322 - DNA, 201 bp, synthetic construct
  misc_feature 1..201: note = Description of Artificial Sequence: Synthetic polynucleotide
  source 1..201: mol_type = other DNA
gtygygtttttgggaayggttagggaagtaagtagaagtygggaagtygygaaagaggygagaaagtgygattttttttttagattttyggtttttygtygaaatttttgtyggtyggttaaattttagataatggaagttttaygtttttatttttatttttttttataagttyggtygygggtttttttyggttyggga

SEQ ID NO: 10323 - DNA, 201 bp, synthetic construct
  misc_feature 1..201: note = Description of Artificial Sequence: Synthetic polynucleotide
  source 1..201: mol_type = other DNA
tgtgaygattttttaagggggttttgtgagtattttttttttatagttaggaaattgaggtatagaagggagggattgtttggtaggagttaatagaggygtatagagtagygtgatgagtttygggttttgggggygggttygygagtaggtagtttttattttatggtggatttttaggtttttttttttgtttyggtt

SEQ ID NO: 10324 - DNA, 201 bp, synthetic construct
  misc_feature 1..201: note = Description of Artificial Sequence: Synthetic polynucleotide
  source 1..201: mol_type = other DNA
tayggagtttttttaygygtttattgyggtttygtygtgttaaggggagtttggttgtttaygggttttatttgttagygagaagatagtttggtygggyggttgattttattttgtaattttgatattgtgtttttygggtttgtyggttttatgatttgtgtttaaagtttgatttttygtagattaggtaaaagttaa

SEQ ID NO: 10325 - DNA, 201 bp, synthetic construct
  misc_feature 1..201: note = Description of Artificial Sequence: Synthetic polynucleotide
  source 1..201: mol_type = other DNA
ttttgtgtttttayggygygtagaggyggygtygygaattttgtgtgtattttataygayggyggggattgaggtttttygtagtttagagtyggagttyggggtyggtygagttygtaggatyggttttttygtygatttttayggttttatttagttttttgggtttatggyggygtyggygttggtgagtggagggtt

SEQ ID NO: 10326 - DNA, 201 bp, synthetic construct
  misc_feature 1..201: note = Description of Artificial Sequence: Synthetic polynucleotide
  source 1..201: mol_type = other DNA
ttatygtagtygatagttttataaatattatygttygtttagttttygttttttygggtyggttgttatttygygttttyggtttggttttggtttygtyggttgtattgtayggttygttttttygtttatttgtttattaattttgtagaygttttgtgtttattttttttttttttttggttattttttttttttgtt

SEQ ID NO: 10327 - DNA, 201 bp, synthetic construct
  misc_feature 1..201: note = Description of Artificial Sequence: Synthetic polynucleotide
  source 1..201: mol_type = other DNA
ggygtttttttygttygtttgygggttygttgygttagtygtygtaataaagtttgatagggygtggtttygygggaagygggttyggygttgttyggtyggggygtaggyggttyggttygggttttttyggtagygtygagtttagggttttttaattygttatygtygtygtttgtttygtyggggygttttagtttt

SEQ ID NO: 10328 - DNA, 201 bp, synthetic construct
  misc_feature 1..201: note = Description of Artificial Sequence: Synthetic polynucleotide
  source 1..201: mol_type = other DNA
aaaataaaggatgggtgaataaattgagattyggtttgttgggygttatgtggagatygtgtgtaggaagagttaagatattagagtygggggggtttyggtgatttttgtygttttttgtattttgggtttatggttggggtttgtttttttttagttggtagtgttattttttttgtgttttattaagtttattagtaa

SEQ ID NO: 10329 - DNA, 201 bp, synthetic construct
  misc_feature 1..201: note = Description of Artificial Sequence: Synthetic polynucleotide
  source 1..201: mol_type = other DNA
tgtygtggtttygggttattgtagtttttttgtttygggttttygtggtttttttgtttyggtttgttaagtgtttgggattgygggygggygtygttaygtttgattggtttttgtatttttggaggagayggggtttygttttgttgatygggttggtttttggtttttgatttygagtggtttgttygttttggtttt

SEQ ID NO: 10330 - DNA, 233 bp, synthetic construct
  misc_feature 1..233: note = Description of Artificial Sequence: Synthetic polynucleotide
  source 1..233: mol_type = other DNA
agtattygatttgtgaaaattaygtttatgtagtaatataattggttygaaagygttaaagagttaattaagaggttttyggtttttygtagtttatagygtagttygattttttagagtygtygagtagaygttyggtgaattttagaggyggyggagggtggygaggagttttygttttttttygtttttttttttttygatttygttttttttttttttttttttttttt

SEQ ID NO: 10331 - DNA, 201 bp, synthetic construct
  misc_feature 1..201: note = Description of Artificial Sequence: Synthetic polynucleotide
  source 1..201: mol_type = other DNA
tyggagttgtagtagaagygttttygatttygtttaggtttttagtttatttttttttgaaggtyggtagggggygttattatygttggttttttygygyggtttyggttttygtttygggaatygagtgtttgtagttygygattttggggaggtatagggttagggtatygtttyggyggagaaagtggttgtgtygyg

SEQ ID NO: 10332 - DNA, 201 bp, synthetic construct
  misc_feature 1..201: note = Description of Artificial Sequence: Synthetic polynucleotide
  source 1..201: mol_type = other DNA
gggggaygggttagttagggtaggagtttaaggatatgaggtaaagattttaggttgggatttttygtagttyggaggyggggggtggggagggagggtygggggggtgttgggyggagaygttgggtattggggttagygttgggtagttatgtaygggggyggggtaataggtaggttagttgttgttgttttttagga

SEQ ID NO: 10333 - DNA, 201 bp, synthetic construct
  misc_feature 1..201: note = Description of Artificial Sequence: Synthetic polynucleotide
  source 1..201: mol_type = other DNA
aagttygtgtagygygygtygttttattaaygygtttyggygtaggyggtagaggaaagyggtttttaygygyggygttygyggtttyggggttaggggygyggttagtagtgttagtaygttttttattaygtygtygtygtttttttyggyggtggtygagatyggggygaggttygtagygatyggttyggyggggtt

SEQ ID NO: 10334 - DNA, 201 bp, synthetic construct
  misc_feature 1..201: note = Description of Artificial Sequence: Synthetic polynucleotide
  source 1..201: mol_type = other DNA
taggaatgagtttgttgagggtttagtttyggggtygggagtttgttgtaaaggatatgaaaaatttttattattatttttgtatgtgaaaagaatatgygtgttggaaataattttttaatttatatatttttaaatatttgtttagatttataggagaaatatttttattgatttttgtataaagtgtattggaggaaa

SEQ ID NO: 10335 - DNA, 201 bp, synthetic construct
  misc_feature 1..201: note = Description of Artificial Sequence: Synthetic polynucleotide
  source 1..201: mol_type = other DNA
ggggyggggaggagggyggagggggtgtaaattaagtggtgggaaagagataaaggaagagtgaagagygagayggtgyggatggggaagggggaggggygyggaggggtagtyggtgggtagygygtygaggagttygagtttgaatttgattaagtattgggggttttgtygtgggggtggggygggggtayggtygag

SEQ ID NO: 10336 - DNA, 201 bp, synthetic construct
  misc_feature 1..201: note = Description of Artificial Sequence: Synthetic polynucleotide
  source 1..201: mol_type = other DNA
agtttttaagggaggaggggagagttgtagagaggaggaggggtyggggaggtyggttttataaaggyggttggaataattttgttygttagatttygtygttyggattttttgagttgttygttattttaygtgatygygtygttttttagttttatygttgagtgagttggggygygtttttatttygtttttagtttt

SEQ ID NO: 10337 - DNA, 201 bp, synthetic construct
  misc_feature 1..201: note = Description of Artificial Sequence: Synthetic polynucleotide
  source 1..201: mol_type = other DNA
gaggagtagtagygttygtygggggatgtagtagyggtagyggyggyggyggyggyggtagyggtagyggyggygyggagttttttgygtttagyggttyggtygggttgyggtagaggyggyggyggygtttygtttygggtgaggttgtyggggtygtgygygttggtgagtggggygtggggggtaggtgggtggttg

SEQ ID NO: 10338 - DNA, 201 bp, synthetic construct
  misc_feature 1..201: note = Description of Artificial Sequence: Synthetic polynucleotide
  source 1..201: mol_type = other DNA
gttyggagaagtggatttygttttatygagaggttagggtttttatgttttygttttygatttyggtttagtggtttttgtttttyggattgttttyggyggggyggggttgtatttyggagttttagtttatttygtagtttttttygtatttgatattatyggttattttttataatatggygttyggygttttttaaa

SEQ ID NO: 10339 - DNA, 201 bp, synthetic construct
  misc_feature 1..201: note = Description of Artificial Sequence: Synthetic polynucleotide
  source 1..201: mol_type = other DNA
ggaatttggaggaatatggygttgtygttttttggyggaagygttygggtttgygggtaggggtagttttttagggttyggaggygtagtgaattttygygagttygtagttygagtttygygttttyggygtttttgagttygtttagygttgtttgygtttttttttttttttygttygtygttttttttttttttttt

SEQ ID NO: 10340 - DNA, 201 bp, synthetic construct
  misc_feature 1..201: note = Description of Artificial Sequence: Synthetic polynucleotide
  source 1..201: mol_type = other DNA
gttagggatygttttttattgttttttggttgtygaggagyggttatygggttyggttttagtttttttgttttgatttttttttttaagtttttatgtygagttggagagyggtttttgagtaygtatgtggttygaaaggtggtagttggtygggtttgggttttttatgtgatttagttatgygagggatyggttgaa

SEQ ID NO: 10341 - DNA, 410 bp, synthetic construct
  misc_feature 1..410: note = Description of Artificial Sequence: Synthetic polynucleotide
  source 1..410: mol_type = other DNA
agatatgttgggttagtagtgttggttttattttagattttttttagttttttttagttagtygttaaggggtttttttaatyggaaatttttaattygygatttyggygggtgtatygtygagtttttygggaagtgtagttttagygygagygggaygttgggaaatgtagttttgygygtttaygttttygatygggtygtgttygtygyggttttgygaggttygaggggtaagggagygtgtagygggggygggattaygaggyggyggggttgggggyggtttttgtgtttgygtyggggatygyggtgatttygttgyggatyggttygyggtgattttagygygaaygagttggttgtyggttggggygagaaaggtttgyggatyggtttgggygtatgyg

SEQ ID NO: 10342 - DNA, 201 bp, synthetic construct
  misc_feature 1..201: note = Description of Artificial Sequence: Synthetic polynucleotide
  source 1..201: mol_type = other DNA
gagttagagatgtatttttggtyggtttgagtatttgygggaattttgtgagtttttgaggtttattttttgttttttattttttttttttgtaaatttygagttyggggtaaagttgttttttttttttatatttttttttaattygataattaaygttttttagttttygggaatgggayggattttttttaaggattt

SEQ ID NO: 10343 - DNA, 201 bp, synthetic construct
  misc_feature 1..201: note = Description of Artificial Sequence: Synthetic polynucleotide
  source 1..201: mol_type = other DNA
gggatttttygtttttyggtttagggggtatttatttygtaygtggagttygggtagygtttttagaygtatttagygggatatyggagaggaygtygaygtagtgtaaygtttyggtygaagygtygaataatatgygygygtygyggaggaggtgyggggygtgttygtttaggtagygggtygtttygaygtggtaga

SEQ ID NO: 10344 - DNA, 201 bp, synthetic construct
  misc_feature 1..201: note = Description of Artificial Sequence: Synthetic polynucleotide
  source 1..201: mol_type = other DNA
atgtgttttgtygagttgatttgtttagtttattttttattttgaaaygaygttaagtatgaagaagagttgtataaataatgttaataatttyggtgtygtttttatgggggttatggtggttttagtgtattttatatgttttttttttttttgtttttttttttygtgtatatatatattgttttttgatttaagagt

SEQ ID NO: 10345 - DNA, 201 bp, synthetic construct
  misc_feature 1..201: note = Description of Artificial Sequence: Synthetic polynucleotide
  source 1..201: mol_type = other DNA
gtgattttgygaggttatatttygggtgygtygttgygggttygtgggttygtgggttgtagtttttygtttttgtygggtggaygagtttygggttygygtggagttgttyggttaaggtyggttygggaggggygyggygtagggygggtaggggyggggttttaggttaaygtttagttttagatttagtttygtygt

SEQ ID NO: 10346 - DNA, 201 bp, synthetic construct
  misc_feature 1..201: note = Description of Artificial Sequence: Synthetic polynucleotide
  source 1..201: mol_type = other DNA
ggagggagaaagggagagagttttagtygtttyggttgtggtaggaggagttttaagagygtttttygagttygtttygtatttttaggtttagttyggygtaggttttttttttygttttttttattttygttagttgttgaaatttttttatygttttttygygggtaatagtgttygttaggygtygtygygyggtgt

SEQ ID NO: 10347 - DNA, 201 bp, synthetic construct
  misc_feature 1..201: note = Description of Artificial Sequence: Synthetic polynucleotide
  source 1..201: mol_type = other DNA
gtttttaatgygggyggttttygtattttaygyggttyggggtttttgtttatttttygygggygggtttyggatttttggggttttttagttttttttygtttttttttygygtyggtttygtgttttgyggttyggyggtttyggyggygygagtygggggaggyggygaggggtgttttygaggttyggyggygyggt

SEQ ID NO: 10348 - DNA, 201 bp, synthetic construct
  misc_feature 1..201: note = Description of Artificial Sequence: Synthetic polynucleotide
  source 1..201: mol_type = other DNA
ttygtattttttttgatttttatggatatttagttaatagtaggaataaaaattaagatttttttttttttattygtttggatatttattttttyggttygygtygtygtgttttttattyggttatatagygattttaaaagtttagtttttatttygyggagatttygatagttttgggaggttttttttaaaagggaa

SEQ ID NO: 10349 - DNA, 201 bp, synthetic construct
  misc_feature 1..201: note = Description of Artificial Sequence: Synthetic polynucleotide
  source 1..201: mol_type = other DNA
agtygttyggttgaygtgataagggaggtgtaggttaatayggygatttygygttttttggyggtagtgtyggagtagyggygttgtttttgatttattyggtattyggttttygggatygtttggyggttgtgaatgtagagttggggygaygtggggttygttttttgggattgggtgtgagtttgygtagtgagttat

SEQ ID NO: 10350 - DNA, 201 bp, synthetic construct
  misc_feature 1..201: note = Description of Artificial Sequence: Synthetic polynucleotide
  source 1..201: mol_type = other DNA
aattgaaygtttgaaaygaaggtggygyggtttggataaatttgatttttygatatttttygtttttgygttygttttygttaagyggggaggagygatygttataatggattttttygtaggttttgtgygygttgggaatttagttgtygtygtttygtagagttttttgttttyggagggygtttattttygggtygt

SEQ ID NO: 10351 - DNA, 201 bp, synthetic construct
  misc_feature 1..201: note = Description of Artificial Sequence: Synthetic polynucleotide
  source 1..201: mol_type = other DNA
gtttygggygtttgttgtttygtgtttttatygaygattttatttagttgygttaygygtygtttyggttgtyggtygygygttttgttygtyggttttygttygtaatyggyggtttagggyggattygggtttttgygttttygygagaagygyggygttgyggggtygtgggygtttgagttygygyggttttygagg

SEQ ID NO: 10352 - DNA, 294 bp, synthetic construct
  misc_feature 1..294: note = Description of Artificial Sequence: Synthetic polynucleotide
  source 1..294: mol_type = other DNA
ttygtygtttatgtttttattgtaaggtygtagttttygtygtygatttygatttttygtttygtttagtygyggtttygttyggygtttttttttyggtggaagtttaagtttaattaattgagttygaggygggagggaagggttttgygygtygtggttygtttygtttttttttygygttttttttttygttttgggtggtatttttttygtyggtatttataataagtygttgattaatgaggtyggggtygttttatttygttyggtygggtyggggttttygyggga

SEQ ID NO: 10353 - DNA, 201 bp, synthetic construct
  misc_feature 1..201: note = Description of Artificial Sequence: Synthetic polynucleotide
  source 1..201: mol_type = other DNA
taagtttatagaagagtaaatttttatttttygaggttgttgtggaagttatyggggttgggatagtagagaggaatttagaygggaatatygttttttygttagattttyggyggtttttttttttttttttaaatttatttttaaagttaagtgtaggttttttygttttagttagaagygttgygtgagtttttatac

SEQ ID NO: 10354 - DNA, 201 bp, synthetic construct
  misc_feature 1..201: note = Description of Artificial Sequence: Synthetic polynucleotide
  source 1..201: mol_type = other DNA
gaggtttaygttttttagatygttatagtygttgttatagggtttgagtttgggyggygtttygtttyggtygtayggtgygtyggygttaatttttttygaaggtttyggtagttaagattgtaggtttttattaagtattgttttygaattgggttaygagagygtgtttttgattggtttgttttggaggttgggaag

SEQ ID NO: 10355 - DNA, 201 bp, synthetic construct
  misc_feature 1..201: note = Description of Artificial Sequence: Synthetic polynucleotide
  source 1..201: mol_type = other DNA
tttttygygygtygttttttttygtygtyggtygygtgygttttygttttttttttygyggygggagtattttygttygttatttggggattygygtygygtttttygttttygttygttyggygtttatttttygygttttttgttygttggggttataattgttttttatttttyggaggggttattttgggggtggtt

SEQ ID NO: 10356 - DNA, 201 bp, synthetic construct
  misc_feature 1..201: note = Description of Artificial Sequence: Synthetic polynucleotide
  source 1..201: mol_type = other DNA
gyggtttyggtgagyggggygaggggygggtgggtagyggygtygggggaggtygaggaggygaatggtggtgtyggggyggygggtatygggygaggtygyggttagttttttygggtyggagttgggtatygyggggayggggagtgtygggggtaggtgaggttagggtaggagtttaygyggtgggtgygaaggttt

SEQ ID NO: 10357 - DNA, 201 bp, synthetic construct
  misc_feature 1..201: note = Description of Artificial Sequence: Synthetic polynucleotide
  source 1..201: mol_type = other DNA
ggaggygttgygttaggyggaggaggagygtaaggttaagtaygttaagatggaggyggagygygaggtygtgygttagggtattygagataaggtgygygtygggtyggtttygtttgygggaaggyggttttgagtttagyggggatttagatttygtttgggtggaaggggttgttyggaagaggggygggygttttt

SEQ ID NO: 10358 - DNA, 201 bp, synthetic construct
  misc_feature 1..201: note = Description of Artificial Sequence: Synthetic polynucleotide
  source 1..201: mol_type = other DNA
aaagagaaaagaaatagataaaattagggtagggggtaaaaaagtttttygygtttttyggaatttagyggtygyggtygyggttatygtygtygtygtygggggtgggtttyggaagagtttgtttagtagggaaggggaggaygggttaggagygaaattttgtaggygaggaagggatagaygygtaaagaaaaagtg

SEQ ID NO: 10359 - DNA, 201 bp, synthetic construct
  misc_feature 1..201: note = Description of Artificial Sequence: Synthetic polynucleotide
  source 1..201: mol_type = other DNA
ygygggygtagyggyggtygggtaygaggtygggttgatattattatttgttggggygygggaagaayggtagttgttttgygttgtttyggygagggaygtttggaaaaggttgaagttttgggygtttttaagttygttatttayggggttttygttattttagtttgttygtygtyggtygttttttgtgattttttg

SEQ ID NO: 10360 - DNA, 201 bp, synthetic construct
  misc_feature 1..201: note = Description of Artificial Sequence: Synthetic polynucleotide
  source 1..201: mol_type = other DNA
ttttttagggatggttttgtgtttgggttttttttttttttaaatttyggggtggtttttgttttattagattgaatyggttttaaggagaaaagttgaygattattttgttttagttttygggaagttttgttttataaagaataagagtttttggttttgtgaaatgagttataggttgttttgattatgtttatttgg

SEQ ID NO: 10361 - DNA, 201 bp, synthetic construct
  misc_feature 1..201: note = Description of Artificial Sequence: Synthetic polynucleotide
  source 1..201: mol_type = other DNA
ttttaaatttygatygtyggtttggygygyggttgygtttatyggtttygygttgttgtygtygttatygttatttygtygtygtttyggttygygggtygtttaggttagtattygggtyggtttgttttygtyggtygttygggtgttygtygtygygtygygtttyggtygggygtggatggagggygtygygygttt

SEQ ID NO: 10362 - DNA, 201 bp, synthetic construct
  misc_feature 1..201: note = Description of Artificial Sequence: Synthetic polynucleotide
  source 1..201: mol_type = other DNA
yggtyggatttttttttagattgtttgyggtttgaaggggttaggttygygtaaggttttaggttgtttgggygtygggtygtattgttaggagttgttygggagtggttttttaggaatattaggtattgattatatattaggggttgggaaattaggtggtttgtattaaggyggtttyggggatttgtttgtggtaag

SEQ ID NO: 10363 - DNA, 463 bp, synthetic construct
  misc_feature 1..463: note = Description of Artificial Sequence: Synthetic polynucleotide
  source 1..463: mol_type = other DNA
agygggygtttygtagtygtgttagygttaygttgtagtagtygagtattagttygaaaggaagtaygaaagyggttagagtttttaggtttaggtgggyggyggygtggatyggygaygggtggtatagttggtataygyggtttttttataggtggyggtagayggyggtygggayggygagtaatagggyggttagttagatygttagtagtaggyggygggttagggtygggttgygtagtygaggygttaggaaggggygggtgattgygaggtagygttgtaggttgagtaggtyggtgagtagtaygttggygtatatgttgagygygtataygtagtatatygttttgtagttygtttggtttagyggttaggtttgtygggttaggaaggttataaagagyggygtgagtagtagtatygygtygtyggttagygttaggtgtagtataagygt

SEQ ID NO: 10364 - DNA, 201 bp, synthetic construct
  misc_feature 1..201: note = Description of Artificial Sequence: Synthetic polynucleotide
  source 1..201: mol_type = other DNA
ggggaygttagtggattggagtygyggagtttygagggaaaaattttgtaggygtygyggtygggattyggttayggttttagtttattttagtaggtgygggaggaagaggtagygtyggagtttygaggttagagagtttyggyggyggyggtygtttttttttttygagttggtttgaagtygttgggtattttyggt

SEQ ID NO: 10365 - DNA, 201 bp, synthetic construct
  misc_feature 1..201: note = Description of Artificial Sequence: Synthetic polynucleotide
  source 1..201: mol_type = other DNA
agggttgggaggatttgtagtttttttgttggttttttttttttaggaagtyggttagtttggagtyggttgtttatttygatttatttttygtttgggyggagtaggaatgtggaagttggttygaaaggattgtgtttttttttygttaaatatttttttttygygttttttattaagttttggtyggggttgtggagc

SEQ ID NO: 10366 - DNA, 201 bp, synthetic construct
  misc_feature 1..201: note = Description of Artificial Sequence: Synthetic polynucleotide
  source 1..201: mol_type = other DNA
agggyggagttttyggggtagaggygtttygyggtaagatygtygaagtgggtttygayggttgggtygttgttttyggggggtygaagggtgygggttygggtttygggggtyggggttttttttttagtattaygaatttgaygtygtygagtttttttattatygttaygttgttgaygaattgtttgaagyggtttt

SEQ ID NO: 10367 - DNA, 201 bp, synthetic construct
  misc_feature 1..201: note = Description of Artificial Sequence: Synthetic polynucleotide
  source 1..201: mol_type = other DNA
yggaggaggttgyggggggtttyggtttaggygaaggaagggtaagaggttgttygatygggggyggygtygggaggtgggtgggtttaatatttaggtygggggaggggtttaagagatatygggaagggtagtygagttttaggggygggtggggtggtagttgtgtgtagtaggggatagggttgggtttttggaagt

SEQ ID NO: 10368 - DNA, 201 bp, synthetic construct
  misc_feature 1..201: note = Description of Artificial Sequence: Synthetic polynucleotide
  source 1..201: mol_type = other DNA
tagtygatatgaygygyggygtagttaatgggaggyggagttggygttttttggtygggggggggtyggaggggtgggtttygygttttyggtgtttgtygtgtttattgaatggagagagygagygtyggttagtttattyggtygtttygtgttttagtygtagtygtygygttttttagtttagttttaagtyggatt

SEQ ID NO: 10369 - DNA, 201 bp, synthetic construct
  misc_feature 1..201: note = Description of Artificial Sequence: Synthetic polynucleotide
  source 1..201: mol_type = other DNA
ttttttttaagtttttttttggggattgatattttattagtatagagattaataatgttagataagagatttttgattttatatttggggttttyggaaygatgtttgggagagaaaatatgaygttttttgtagaggygaattttagttygggaggagggaggtygttgggatgtgtygtyggyggtttttgggttyggt

SEQ ID NO: 10370 - DNA, 201 bp, synthetic construct
  misc_feature 1..201: note = Description of Artificial Sequence: Synthetic polynucleotide
  source 1..201: mol_type = other DNA
agattggattygaattyggtttattttattygagyggygaygttagygttgattttaggygtgtttyggttttyggygyggtttyggtttaatygtgtaygttygyggaaggtttygtattygygttagaagtggtttgttyggggttatyggttygtaagttttyggtgttttygaggtttttgtttygtttygygyggt

SEQ ID NO: 10371 - DNA, 201 bp, synthetic construct
  misc_feature 1..201: note = Description of Artificial Sequence: Synthetic polynucleotide
  source 1..201: mol_type = other DNA
ggggttggggagggttgtyggyggygyggyggggtyggygggaggygggaggttgygygyggygygggagygtgygtyggggttagtaggggyggggttygygyggtygtygggattggaggygygggggtagygggtagggtattttgagggtatattttyggttatttggygggagatttagttttgtygygygtygtt

SEQ ID NO: 10372 - DNA, 201 bp, synthetic construct
  misc_feature 1..201: note = Description of Artificial Sequence: Synthetic polynucleotide
  source 1..201: mol_type = other DNA
gtttyggtygtygggygygtagtygtttttttygygttttgttygtttttatggtattttttaggaaygggaagggggtgggagtygagtyggyggtygygtygygtygaatgtgtgttttttttttyggttgtttayggyggtygaggygtattgtattttgttggygtygaagggtgttttggaatagtagagggagga

SEQ ID NO: 10373 - DNA, 201 bp, synthetic construct
  misc_feature 1..201: note = Description of Artificial Sequence: Synthetic polynucleotide
  source 1..201: mol_type = other DNA
tttagtgttgttygggygttttttygtagtagttttagggygaggaggatggggggggttttygtaggggttatattgtyggagttttayggattygggygggayggtgaggtttttatattgagtyggtggtaaagttttygygaggatgaaggaggaatttygtgttttttattttattaggtttygtattttttggtt

SEQ ID NO: 10374 - DNA, 258 bp, synthetic construct
  misc_feature 1..258: note = Description of Artificial Sequence: Synthetic polynucleotide
  source 1..258: mol_type = other DNA
ttttttgggataagaagtggagtggggyggttaggaygygggtygtggggatygygagggaggagggggyggtygttyggatttatttygtggggttttygygygygggygtttyggygtgtyggattatgtygtyggtagtttygggayggggaayggaggygtttaggygtygggtygygyggaaygyggagtttygggygttygtatgtttttggttttggttttttggaagggttaggtygtygttgtygtygc

SEQ ID NO: 10375 - DNA, 201 bp, synthetic construct
  misc_feature 1..201: note = Description of Artificial Sequence: Synthetic polynucleotide
  source 1..201: mol_type = other DNA
ttyggtygttaygtttttttygagggtygtttygttttygtygggtttygygagygygyggtgggggaggggagggtttyggagygygtttgygtggggygggggyggtagtygattaggggttgggtttggtygtttagggtygggttttggttygtygtttayggtgyggagggttggtgggttttttttggtygtygg

SEQ ID NO: 10376 - DNA, 201 bp, synthetic construct
  misc_feature 1..201: note = Description of Artificial Sequence: Synthetic polynucleotide
  source 1..201: mol_type = other DNA
tagtagttttttagagttttggtttggtagggaggggayggygttygagtagttatattgtagtttttygggtttttttttyggtyggygtaggtttygygtttaygattttttttgggagtyggatttgttttttttatygtygttattygtyggtttttgygttttttggttttygatatttygtttggtygttttttt

SEQ ID NO: 10377 - DNA, 201 bp, synthetic construct
  misc_feature 1..201: note = Description of Artificial Sequence: Synthetic polynucleotide
  source 1..201: mol_type = other DNA
ttttygygttatttygggttygttttygttyggttttttyggagyggtygygtttttagtyggggagtttaggggttttggttygyggagtygggygygyggggggyggttggggtygtagtagggggaggttyggygttygtagtygtyggygyggggtttatygggygtgtgggtttatttyggtyggggygygayggg

SEQ ID NO: 10378 - DNA, 201 bp, synthetic construct
  misc_feature 1..201: note = Description of Artificial Sequence: Synthetic polynucleotide
  source 1..201: mol_type = other DNA
gggtttttagtaygygttttagygtyggagtagggttagggtttttttgygattyggtttygttttagatttttttagttttyggtygyggattygggtygygtgtgagygttttttgtattttttatttttagggttygtygagagttaygattttttatagaaaatgagygataaagagattttgtattgttttgattg

SEQ ID NO: 10379 - DNA, 201 bp, synthetic construct
  misc_feature 1..201: note = Description of Artificial Sequence: Synthetic polynucleotide
  source 1..201: mol_type = other DNA
tygggtttagggygtygtttgtagttgygygyggtygtttttagatggaatttttttattaaygtaaggttyggtyggagtagttattygggagttgggyggygaggggttatttttttttatttyggygggtgtaggatyggggggtttgggtagtaattagtggggaggagygttggattgtgtaygtygagttyggta

SEQ ID NO: 10380 - DNA, 201 bp, synthetic construct
  misc_feature 1..201: note = Description of Artificial Sequence: Synthetic polynucleotide
  source 1..201: mol_type = other DNA
ttygttttattttttgtttgttttyggttgttagagatttaggtgtagagagattttagaggtggygttyggggttttggygttttttttgyggaygttygttgtagagtaggaagtygtygtttyggggyggaggggygagtygggttagggggtyggggtggagaggtttgtagggtttgygygttttttttattygyg

SEQ ID NO: 10381 - DNA, 201 bp, synthetic construct
  misc_feature 1..201: note = Description of Artificial Sequence: Synthetic polynucleotide
  source 1..201: mol_type = other DNA
agtattaggttyggtttttygtatatygtttygaatttygggggtaygggygygggtttttygggtttttygggggaygyggggtttttaagttaaaygygyggttygggggayggygtygygggttttttygggtaygygygttttttaggggaygygagttttttyggggaygyggygttygygttgtyggttttttat

SEQ ID NO: 10382 - DNA, 201 bp, synthetic construct
  misc_feature 1..201: note = Description of Artificial Sequence: Synthetic polynucleotide
  source 1..201: mol_type = other DNA
ttttyggtygaggaggggtygygtggygtygyggggggygggtygygtaygtttttygtagggaggatttagggatagttagggtttygggagagttygygygtatygttyggtttygyggygttagttatggygttygtgygtggtttygttagggatggggygaygyggttagagtygtaygygatygaaattygtatt

SEQ ID NO: 10383 - DNA, 201 bp, synthetic construct
  misc_feature 1..201: note = Description of Artificial Sequence: Synthetic polynucleotide
  source 1..201: mol_type = other DNA
gttagaaaggatygagaaaaattttaaagttttaagtttgagttagggagggttttagagggaggtttgattgtagatygggagtttttttttttygtgygtygttgttygggaygagaaattygtggggtatttaggattaggataygaggttttagtttgggtaggtggataagttgtggggttttatttttygtaggc

SEQ ID NO: 10384 - DNA, 201 bp, synthetic construct
  misc_feature 1..201: note = Description of Artificial Sequence: Synthetic polynucleotide
  source 1..201: mol_type = other DNA
gtygttgagtaygygttttaggtaggttttgggaagttygggatggaagtagttttttttttttygtttttttttttttttttttttttttttttttttygygtttttttttttttttttgttttttttggaygtgggttgtyggttgtagttyggagggayggggygygggayggagtttttygygggaggaggggtygg

SEQ ID NO: 10385 - DNA, 203 bp, synthetic construct
  misc_feature 1..203: note = Description of Artificial Sequence: Synthetic polynucleotide
  source 1..203: mol_type = other DNA
gtaggagyggttygtgttygygggygggagygtgyggtttggattgtttygtyggataggtattgttttttygttttttygggttygaggygggtygygygygtyggtygtygttygggygtttygyggtgggygagatgygtygygttygttttatgtttgtygttygygygttttttgttttttatttygtagtygttygt

SEQ ID NO: 10386 - DNA, 201 bp, synthetic construct
  misc_feature 1..201: note = Description of Artificial Sequence: Synthetic polynucleotide
  source 1..201: mol_type = other DNA
tttttygtagagggtaggatatttattttttygtgtatttgtttttttttyggtttttygtttttagtagtattttaggatttaggggtgttatygggtyggggagggaggggttgagtttgggtttggggatatygggatagggggaggggttggygttttygtttggtygggatttygtggtttagygyggttttayga

SEQ ID NO: 10387 - DNA, 201 bp, synthetic construct
  misc_feature 1..201: note = Description of Artificial Sequence: Synthetic polynucleotide
  source 1..201: mol_type = other DNA
agygtttgtttaatttgtagtgatatygtttagttgtttagggttttagttgttatagttaattagttygyggtyggggaggagygtygggtaggggggygggggggtatgaaggggtyggygggggaggttgtgggggttgtaggaggggtaggygtaggaggaggtttgtggtttttaggttyggttygtttttttagg

SEQ ID NO: 10388 - DNA, 201 bp, synthetic construct
  misc_feature 1..201: note = Description of Artificial Sequence: Synthetic polynucleotide
  source 1..201: mol_type = other DNA
gggygtattgggygaaggygaygygyggttygtgggtgtagygttgggygttttgaggaggtttttgttgyggtttygggygtttgtgyggtttttgagygyggagttgggatygygttttttttygttattggaygaygtgagtaaaygtttygttttygggtttygtttttgtygttgttatygttttygtttttttag

SEQ ID NO: 10389 - DNA, 201 bp, synthetic construct
  misc_feature 1..201: note = Description of Artificial Sequence: Synthetic polynucleotide
  source 1..201: mol_type = other DNA
taggtagaggggggygggagggggtgtgagggagaggaggagtyggagtygtygttgyggtttttttyggggaggggagaggagaatttttttttttttygtttttttttagtttttygttggttygggagggggtggggygtygaggtygyggygattyggtagggtttggtyggtgaagagtaggygggyggggtgygg

SEQ ID NO: 10390 - DNA, 201 bp, synthetic construct
  misc_feature 1..201: note = Description of Artificial Sequence: Synthetic polynucleotide
  source 1..201: mol_type = other DNA
ttaattttgygttttttttttagttygagttttttygttgtttttttttttttttttttygagtttttttttttttggygyggygtygttagttagtttyggyggggagagtgtaggtattttgtttttagaataattagtaggatttaagtyggtttttygagygygttttttttttttttttttgtttttttttttygg

SEQ ID NO: 10391 - DNA, 201 bp, synthetic construct
  misc_feature 1..201: note = Description of Artificial Sequence: Synthetic polynucleotide
  source 1..201: mol_type = other DNA
ygyggayggygttygatagtagttggaggagyggtttgtygatttggyggygagttatttggaggttattygtgygygggaygagtgggatyggtagaaygygyggttgygttaggagaaygttyggttgyggttygagaatyggyggttgaagygygagaatygtagtttttttygttaggttttgyggtttttyggyga

SEQ ID NO: 10392 - DNA, 201 bp, synthetic construct
  misc_feature 1..201: note = Description of Artificial Sequence: Synthetic polynucleotide
  source 1..201: mol_type = other DNA
ttygttttttygttttagttygygtatttatygygtaygtagagtagtgatatggtygaggatygggtaagtttttgtygygttttagtygygtyggatygttttttttttttttttagtaggtgtygygattgttttygttatyggttttaygggtttggtagttttttatggtttyggtygtaggtagygtttygtygt

SEQ ID NO: 10393 - DNA, 201 bp, synthetic construct
  misc_feature 1..201: note = Description of Artificial Sequence: Synthetic polynucleotide
  source 1..201: mol_type = other DNA
tggttattgttgygtaggygtagttttgggagyggygggagttggaagtttaggagttttagggggygtagggtygggtagaaggyggygagttgggggyggatatttatyggggattggaagyggttygygtaggttggggatattyggggttagggygggtygtttggggtgggagagtatagtgaggaagtttgaygt

SEQ ID NO: 10394 - DNA, 201 bp, synthetic construct
  misc_feature 1..201: note = Description of Artificial Sequence: Synthetic polynucleotide
  source 1..201: mol_type = other DNA
ttggggaygtygtagttyggttyggggagggggygttaggtygggagtygtagygygggagggaygagttygggtyggyggggggaggggagygggaagygtttttgttgttggygatygggattttttttyggtataggggaaaggyggggaagttattttttatygggtttgtgtttttgagaggattttttgatggtt

SEQ ID NO: 10395 - DNA, 201 bp, synthetic construct
  misc_feature 1..201: note = Description of Artificial Sequence: Synthetic polynucleotide
  source 1..201: mol_type = other DNA
ggtttttgggaggygtygygtgggggygyggttygtggagttygggygttagggatyggtyggggtyggygtaygggtgygttttgggttygttygggtygtgggagttagggagttagggagttagggatttyggttttygtayggggtagataggggtagygygggygattyggagygtttgygttttygyggtttttt

SEQ ID NO: 10396 - DNA, 523 bp, synthetic construct
  misc_feature 1..523: note = Description of Artificial Sequence: Synthetic polynucleotide
  source 1..523: mol_type = other DNA
agagtatygggttttttattgttttagagygygtgtgyggttttgggygygtatagtgayggtgayggtatttttggttyggtagygtygaggtygtttygttagatagttagyggtyggyggtaggtygggttatgagyggtaggggtygggtygggtttygttgattttggtttygygyggtagtttttttagttttygtttyggtttttyggtatgagagttygttygggttyggggttgyggttgttttagattygtygtaygttggygygtttygggttygyggagtygyggtgttgatatttgygtygtattgygtygttygttygttygttgtgtgtttygggggygyggttatggaggtggtgggtgatttygagtatagtaagagggatttygtgggatayggggttttygtygtggtttttygggggyggtatygttaggtgagygtyggtyggggygaggtygggtttygggyggtaggtayggggttaggtggttttgaaatttggygtag

SEQ ID NO: 10397 - DNA, 201 bp, synthetic construct
  misc_feature 1..201: note = Description of Artificial Sequence: Synthetic polynucleotide
  source 1..201: mol_type = other DNA
yggyggtaggygggggagggggtgggggtgtaggggyggtttygygggtygyggggggggygygyggygtagyggggtttygggyggggygtagygggtygyggggtttygggygygtttttygygttattttagtgttatggtgygttygttgagtygtygggtttagagttggggttggyggyggagggataygggtyg

SEQ ID NO: 10398 - DNA, 201 bp, synthetic construct
  misc_feature 1..201: note = Description of Artificial Sequence: Synthetic polynucleotide
  source 1..201: mol_type = other DNA
ygttttttygttttttyggtatttgtttattttygtaattgtttyggtttttaatatttgtatygtttaatttttttttttttygttttttgtttttttygtatttgttyggagttttagtatttgtttygtttttygttatttttttttttgttggtttgatggggtgtgggtttaagggagttatatttgggyggaggt

SEQ ID NO: 10399 - DNA, 201 bp, synthetic construct
  misc_feature 1..201: note = Description of Artificial Sequence: Synthetic polynucleotide
  source 1..201: mol_type = other DNA
tttyggtttgayggaatataggygaygtaygtgaagtttaggttttattttagygtaggygggtttttagygatttatagttgttatatattyggttagygtygattttygaaggygtattttttatattttatttygagtatyggttttatygttagggaaggtttttttggatagtaaggtyggggtttaggatttgyg

SEQ ID NO: 10400 - DNA, 201 bp, synthetic construct
  misc_feature 1..201: note = Description of Artificial Sequence: Synthetic polynucleotide
  source 1..201: mol_type = other DNA
yggtaattttttttatygttttttgtagtaggygtygagtygtygttattttgtttttygttttttttttttttttatygatatttatatagygaaaatyggttyggtyggtttgyggtttttattttaygtttgtagttttygttttttygttaggttttatttyggygyggtgttttaggtyggtygyggagtygattc

SEQ ID NO: 10401 - DNA, 201 bp, synthetic construct
  misc_feature 1..201: note = Description of Artificial Sequence: Synthetic polynucleotide
  source 1..201: mol_type = other DNA
ygtyggygggygggaggtatataygygygtataagyggaaagaaagygggtttattgygtggggatgttygttygygtagttgtttyggyggyggyggtygttgtttgtatygaggtygaggygyggyggtggyggyggyggttgyggattgagtttttttygtygggyggtggatgtagggygygggaggggygygaggg

SEQ ID NO: 10402 - DNA, 201 bp, synthetic construct
  misc_feature 1..201: note = Description of Artificial Sequence: Synthetic polynucleotide
  source 1..201: mol_type = other DNA
tttttygttagygtttttygttygttygttttttttyggtttygtttygyggggttgttggagaaattaagtttggggttttttttgtygagtayggggygagttttagaaggttttgtygtgatggaaaatttttaggtaaattttttygggttygtggtttttaggtygggaagttttygttaygtgaagggttttygt

SEQ ID NO: 10403 - DNA, 201 bp, synthetic construct
  misc_feature 1..201: note = Description of Artificial Sequence: Synthetic polynucleotide
  source 1..201: mol_type = other DNA
tttttatatagaaaatttgtattagttatgtaagttaaaaagttgtgtgaatttaggtgtttyggaaaggggttgtaggatatagtaaaatgttagtagygtgtyggattttttttttttatttttttttttaaagaatagaggttaggaaaaatattggttgggaygttagaagggttatgtgttaattataattatatt

SEQ ID NO: 10404 - DNA, 301 bp, synthetic construct
  misc_feature 1..301: note = Description of Artificial Sequence: Synthetic polynucleotide
  source 1..301: mol_type = other DNA
gyggatggggttttgattagttgtggatttttgttttagygtatttatttaatygtgttttttttggttggtagagggygttaaaggygaygtgtyggtygttagttttaggtygagtttygagygtttgtaggaataygtttttttattyggygygggaygtagagttgygagagaattttgtttagygyggatttaaygttagggygtygtttagaggttggtttttgtttyggttttattygtygggagattatagagttgtttttttagtygttygtygttagaaattggaaaaaaa

SEQ ID NO: 10405 - DNA, 223 bp, synthetic construct
  misc_feature 1..223: note = Description of Artificial Sequence: Synthetic polynucleotide
  source 1..223: mol_type = other DNA
ttagagttgtaygtagatgaataygaagagtagygygtagaatayggtgtagaygayggtgaggttaagttttaygtaggggggtayggtyggggttagygtgggyggtagygagtygttgygggttgggttttayggyggggtttttatygggtygggggygttgtygygyggtyggggaygttygggttttatyggggtttayggtygtygtygttttygc

SEQ ID NO: 10406 - DNA, 720 bp, synthetic construct
  misc_feature 1..720: note = Description of Artificial Sequence: Synthetic polynucleotide
  source 1..720: mol_type = other DNA
tagttgaatgaatgggggaggaaggygggygtyggttttttttygygygttgygttttygtttygttttygtttttygggyggattaggttttygtattygtatyggtttttttgtttygtattggttgtttygttygtttgttaaggttaggtttggggggttggggttygagtggtygttgggggatagttttgggtataygatyggagygtttttttttttttygtttggttygygtttaggggayggygagagaygyggttttagttttttttttygggygtttygttgyggttagatgtgggyggatgtggaggtygggttatggygaggagggygggygtttagaggggaagagattttttttttttttygggygtagggtttttttgtaggaggttgtatttgggtagttaaataaagttttttgttatygtygtygygygttttgygtttgtaagggttaaayggtagygtaygyggttggtaggtaggatttyggtttgtgggtttaagagtygaggggygtagggygaatatgygagttttatggtattagygagaggttattaatttttatttatygagggtatttttgtagttaatatttttattaygattatygtttygggggttatygttgtatttttttgggtgagttttggagaaggtattgttygggagaaggggtatagggyggggatggaatayggttgtt

SEQ ID NO: 10407 - DNA, 1683 bp, synthetic construct
  misc_feature 1..1683: note = Description of Artificial Sequence: Synthetic polynucleotide
  source 1..1683: mol_type = other DNA
atygagggagggtgtaaaaggyggggggyggagggggggtagattagattaggygaaatttaataagtttttagttttttagtttaaagtttttattatygtygttattaaygagttattttaattgagttagtatygtygtttattygtyggttygtyggaatygygtttattttttgtaatttygttyggatyggtatttygttttttyggttyggttttttttttttygtygggtgtaaagttaaagatttagtaaggygaygtgaatttttgtatgtagggtatataygtygttttyggtttygggagtgygggggttygyggygyggagggaggttgggygttygggttttygggttaaggtygtygygygtgtttatttatgtttyggyggtttyggtttygttggtttyggygttygtttagatttyggttttygtygttygttygagtttttaaaggtgttgttgyggtaattttatggygatgagtatttgttaaayggygagtygygagttggtygttttagttyggggggygtyggggttttygggygygyggaggyggyggygagyggygggygtttyggtyggtttygygtttttygttygattttgtygttttygtygygttatygatttatggagagagatattaagggggaaaatggygttttyggagttygaggagttttggagtaattatatttatatatataygttygtaygtatatatattygtatatattggtatataggygygyggygagttttgttaattttagtaggagttaaaaaaaattttatatatatatatatatatatatatatatatatattttygttttttygattaatgttttttttttttttgtttttttttttttttttttttttttttttgtttttttttaaaggatgggttggagygttaaaaaatgttggtgggtttgggttygtaggaggyggygygyggagggygagggygtttttgttgagttgtgtagttyggttygttgagttyggyggttttgttygttygttygttygttygyggtygttagtgttgtygtygtygtygtygtygtygtygttgttgttttatggtygygttygtttygygttttygtygygtttygtygtygttygttygygttttyggtgagygttggagtggggtygggttygtgtgtttgtttttygygtttttttygaatttyggatttttagtgaaaggaagggggagggygygggygyggaagggaggtggatyggagyggtagygyggtttagtygaaygggtatygatygttatttygygatttttttygtagggggygtyggygtttaagttgttygttyggagggtttagagtygttttttagattagagtygggggaggygtagttagtagygagttttgagygatttttttttttattygtttttttgttttagtgaatttttgttagttgaagggagyggggtttttgttyggggaaaaggaaaatagttygtggtttgggatttgggattttttgtygtttttagygtttttttygtttttyggygtttttgyggtttagtggtttttgygygtyggagttygtygygaagattgagyggtygyggggatygtygygggtttygygygtatttttgggtttaatattgttatta

SEQ ID NO: 10408 - DNA, 233 bp, synthetic construct
  misc_feature 1..233: note = Description of Artificial Sequence: Synthetic polynucleotide
  source 1..233: mol_type = other DNA
aaataaaaagattaaaggagtagyggtyggggyggtagyggtttttaggtygggatattyggggtggtgygttygggtttgygggggttgygtyggygtyggggaggyggggggagygggagygggygaygyggggaaggggggagttagggggagggygtyggtyggaggaggggyggattygttygttttagtygagtagagtatagtygagtygagyggttygggygggg

SEQ ID NO: 10409 - DNA, 213 bp, synthetic construct
  misc_feature 1..213: note = Description of Artificial Sequence: Synthetic polynucleotide
  source 1..213: mol_type = other DNA
tttttttttaaagtaaatagtatttttttattattttgtagttgggttttttttattggttttygttttttyggtggagayggygaygtggtttataygygagtttttygtygaggatgaattattagttagttygagttgttatattttattttagtatagttatygygagagtttyggggtygygtyggygtgttttaygtaygygtagtt

SEQ ID NO: 10410 - DNA, 236 bp, synthetic construct
  misc_feature 1..236: note = Description of Artificial Sequence: Synthetic polynucleotide
  source 1..236: mol_type = other DNA
ygygttgagttttattttgyggyggtyggaygtttyggygtagggggyggygyggygggygyggtgttgggtatygataaygtgtgygagttggyggygyggttgttttttagtatygtggagtgggygygttaygygtttttttttttygagttgtyggtggtygattaggtggygttgttgygtttgagttggagygagtttttygtgttgaaygyggygtaggyggygttgtt

SEQ ID NO: 10411 - DNA, 233 bp, synthetic construct
  misc_feature 1..233: note = Description of Artificial Sequence: Synthetic polynucleotide
  source 1..233: mol_type = other DNA
ttagttgtggatttttaatatttgtaggttataggattagaggttgggtttttaggagtagaggatatagagtagtgaagaygagattyggagttttagyggtagttaaagataaagaagyggataaatttygttatatttyggaagtygtttttttygtttaagttgygtgtttgattggatagtttttagtttagygtygttgattggataaygtttaaaattttattttt

SEQ ID NO: 10412 - DNA, 737 bp, synthetic construct
  misc_feature 1..737: note = Description of Artificial Sequence: Synthetic polynucleotide
  source 1..737: mol_type = other DNA
ttygttygatttaggtttygagtttttttttygattttttttagtttaaaggttgtattygttttaggtttttttagttyggttttttagtttttttttyggttttttttagtttggggttygggtttttttttyggttgagtagtygggttygygattttttttatttttttyggttygggttttyggttttttttagaggtgaggtaggggttatttagaatttygyggttttttattttttttaagattattttygttttagttttttgttttttattttgtttttttaatttgggttttygattattgtttygattttattttgtygttagggattattagtygtttttttygygtttaggggaygygtagyggtagtttttgttgatggtaagggtttgygtattyggaaattttagggtttggggygtggtgyggtttttgyggttagygggtttygtttgagttttagggttttttygttgttggattaygttttttataggttttagggtygyggatgaatttygatttttgttttttttttyggtgttgtggttattgagttaagtttggygagtygaggtgattygggtygggttgygggaggagttygyggtgaggtggtttygygttgtygggygaggtyggtttaygtggagtygggagtttgaggtttttgtaygygggagttgyggaygatggtggttagtgttattgtttaygaygttatt

SEQ ID NO: 10413 - DNA, 308 bp, synthetic construct
  misc_feature 1..308: note = Description of Artificial Sequence: Synthetic polynucleotide
  source 1..308: mol_type = other DNA
atagaggtgtagtttagggtttaagatttggttttygggttttaagtttaatttygggttygttagtttagtaggtgyggagttaagtttttttatagaygyggttttttttttaygygaggtttttaaatttygtaaattaayggaaatgaagttaygtttygggagyggtgtttttgggaaatgtagtttagygtttyggaygtygtgtttttgggaaatgtagtttagygtttggttagtyggttagaaygttaggaggttygggtygtttatttttygaggggttygtgggttyggtttgtgga

SEQ ID NO: 10414 - DNA, 1100 bp, synthetic construct
  misc_feature 1..1100: note = Description of Artificial Sequence: Synthetic polynucleotide
  source 1..1100: mol_type = other DNA
tgatgygtttggtgattttttttgggtttttgtttaagyggagttataggttgtgggggyggttaggtttttggggaagagtaggtgtygyggtgtyggygygttagtagttygyggttaaggttatttgtttttagggtttyggtatttttgyggggaggyggtaggtagaggaygygygygtagtygygtaggagtttttaggygagtgggggaagtatygtaagagaygyggatttggagygyggttattgygttatygtagygatttgggttatttaagtyggygggattgagaggtygttgygygtgggtaggggtttagattgygttygyggtgtttgtttyggtttttatttyggaaygattgtagttttgyggggttygtygtttatatygygttgaggaygttgtttaagttaggygttygttttygttygyggttttagtygttygtagygygtygtttttagaygygygtggttgttggygagggttgagatygygttttygtyggttagtttttagtagtagygtattttttttgtttygygttttygtttyggattygygtygtygtagtttygyggtgatgagtttygagtyggtttygtygtygtygtygttttagtgttttggttgygatygygyggagtygatygtttagygtttagaggagggygaygaggtttttygygygggygattaygagatggtagtygagttttttygttttatgttagtygggttggygtagtyggatygyggtttgtgtttgaggttgggggaygygttggttygygtyggtygttttttygaagttttgggygygtttygyggygtygygyggttyggggygttgyggtyggaggagttggaagagttggygggyggtttggtgygygtygtgggtttgygygatyggtygttgttygyggagaattygggyggygagttygaggygttyggygagggagggtyggtttyggagtttygygygtttygygatttgttyggttgttygygttgtyggyggttgttgtataagtyggtgaygttgttttgygggtttatagtttgtaagygttgygtggagttag

SEQ ID NO: 10415 - DNA, 214 bp, synthetic construct
  misc_feature 1..214: note = Description of Artificial Sequence: Synthetic polynucleotide
  source 1..214: mol_type = other DNA
gaagaaataatatattgtagattgtaaygagtayggggagttagygaaaggtagggygtttattagggygygttgagagatygggaattttygtaagggygttygygtygttygttattygtygtygygygtaygtygygttttygtttatttttaaataatatttatagttagggtttttttttttttttttttttttttttttgttttygtt

SEQ ID NO: 10416 - DNA, 582 bp, synthetic construct
  misc_feature 1..582: note = Description of Artificial Sequence: Synthetic polynucleotide
  source 1..582: mol_type = other DNA
agtttgttttttttaggaggagttgttttygtygttttttygggttatggtygaygagygyggygyggaggagyggtygggggygygttggggagggggygtygggggygyggygygggygtagaggyggyggggatgtygggyggttygggttgyggygtagtttttttttttgtagttttttttttygttttygtygtygtygtygyggtygyggtttttttttggtttttatttttgttgttttygggtatagattttttgtygtygtygygygtyggtttttttgtygtygtttgttagttttattttttgttatttttttgtttttttttygttttttttttgtygttygtygygtttttttttatttygygttttttttttttttttttttttttttttttttygygggtttttygtttttttygtgygtttyggtygtttttygtttttagygygtygttttyggggatgtttygttttttttttaagagygtygggttayggtygtygtgttttttggagtttyggygagggygggtaygggttttyggtaggtgyggggygtaygygggagag

SEQ ID NO: 10417 - DNA, 203 bp, synthetic construct
  misc_feature 1..203: note = Description of Artificial Sequence: Synthetic polynucleotide
  source 1..203: mol_type = other DNA
tttttaggaggygttttgatttygtatttyggttttttatttttygatygttagttttagggtygtygyggygaygygygattttttttttttgaggggygygggtttyggaygygtygggttttgttaggtatttagtggagggtyggaggtyggygattagttygagtttagtygtttygggagttggygygagtgtygtt

SEQ ID NO: 10418 - DNA, 823 bp, synthetic construct
  misc_feature 1..823: note = Description of Artificial Sequence: Synthetic polynucleotide
  source 1..823: mol_type = other DNA
taattatttgttttagatygygttatttgtaatttgtttygggttggygttatattyggygtttyggygttttttataagtgttttygtttatgattagygtttgtaggggtagttyggagttygggtggggatagtagygtagtttttggtygtagygyggggtgtagaygtygtaygtttygttttttagtygggygtatatygagtagtagtygtagttyggttttyggaygagtttygygtatggtatgygggygttttyggttattgyggttatygyggygggyggygtaatyggygggggttygtaggyggttaggygttygggtgtgtagggygggtagyggaatagtattttygygygygtttygtygtygtygttattygygtttagtagtagtagtagtagyggtagtagyggyggyggyggtagyggtagygyggggtagtttattttyggtagtatgttggyggtyggtagygyggygtggygggygagygagygagygggygggygggtaggtggtayggttttgygagygygggagtygtttttttygttttttttttttttttygtygtygtagtygggttttaaagggtyggttttttttygttttttgttttttttttttttttttttggagattatttttttttttttygatattttttygygtyggtaagtgagtgygygtaygttygttygtttattttygygttggttgygggttttgggggttttttgtttttttygggtttygttttttygtatttttttggtttgattatgatttttgaaggagaatayggataattyg

SEQ ID NO: 10419 - DNA, 293 bp, synthetic construct
  misc_feature 1..293: note = Description of Artificial Sequence: Synthetic polynucleotide
  source 1..293: mol_type = other DNA
ttttgtttttaagggagagggatagtattttttygggtttttagtttttttgggtgtggygggagagttttgggygaggttgygtttatatttgtatttyggtyggttttttyggttgatttygttttggttgatttygygtatattttttttttagygttgtaaggatygtttgaattygttggttatttyggtgatgaattagtggttyggtgtgaagttgygggtgatygagggttgggaygaggayggttattatttagaggagtttttgtattatgagggtygygygg

SEQ ID NO: 10420 - DNA, 262 bp, synthetic construct
  misc_feature 1..262: note = Description of Artificial Sequence: Synthetic polynucleotide
  source 1..262: mol_type = other DNA
gyggggtatgttggygyggttygagggtayggtattggttyggtttttttttygygttyggtttyggyggtttttagtgttttyggtttattgttygggygyggyggttgygggattygygtggygtyggygayggttyggtttagttttgygttttgtaygygygtttttgttttygggttyggtagtygtttttttttaayggggggagggggttattgttttygtttttygttttttttggagttaattagygygttyg

SEQ ID NO: 10421 - DNA, 240 bp, synthetic construct
  misc_feature 1..240: note = Description of Artificial Sequence: Synthetic polynucleotide
  source 1..240: mol_type = other DNA
gttttttttttattgttttttygttattagtygtttttgtygtygagttygtagtygttagygygtttygagtttttttaggttagaggttttygtaggygatggyggataagagggyggggattttagaagtygyggygygttygtygttyggttttgttygggagggggaygygygtayggttttygyggttygggttygagaagttggggggygygggtttttttatttygtagygg

SEQ ID NO: 10422 - DNA, 1240 bp, synthetic construct
  misc_feature 1..1240: note = Description of Artificial Sequence: Synthetic polynucleotide
  source 1..1240: mol_type = other DNA
ggygtttttgygtatagtggttatttggggtygtattttatgtttgtttgagttttttygyggygggttgaygtygggatttgtttaatygttataaaaygtttaaataaaaatagggtyggttttttagtagtggagagttattyggagtatygtttygggtyggtttyggtttygaggtttygggggtttaggatttygtgygtgtggyggggaagaggaatttagagtttttgggttgttgtttttttygtygtttttattgtgaatattgtgyggtggggtgaaygyggggagyggyggggttagtggagtygaattttagggttttgygattgtattygttaggaggggttttygtttggtttgagaaaggttttttgaggttaagagttgggtttgaatataattttyggagtttygagttygttttttttaatatataaataygygtagatttttagaaataggaaygtaygatatatayggttagaagtygygaggatatatagagygtygtttattgggygggggtygtttgggaataaagggtttaggaggygttgtttyggygtttattttgagtttttttgggggtgataygggatgggggtggggtgtaaagggaattgagggaggagagtgygygaggaggggaaagyggtgatttggtttagaggtggggygygtattttaggygagygtgygtgggtygggatttgtagggtaygggggtgggtttaggttggtygttttatttygttttagygtttygttaggttttygtygtttyggggtygttygggtygttagttagttgaygyggggggygggggagttgttaggygygtttygttttgygtygttgggtygyggaggtygtgtagttattggttygygtatygggtygttygggttttygtattttagtgatattaggaggygataaaaggttgyggygtygtyggatttagtatagttgtatygtygagttgygagyggttgygagygagagagygtaagagtaagagagttagagagygagtaaygggtattygttttaygtttttttttagttttatygygygtttygtttgtttttttatttygttygattttattyggttyggtttttgygygggtatagtttagagttttggggyggtgtaggtagtttygggatttttyggygygtygtygygtttttagataaaggtttggtyggyggtttyggttygtt

SEQ ID NO: 10423 - DNA, 222 bp, synthetic construct
  misc_feature 1..222: note = Description of Artificial Sequence: Synthetic polynucleotide
  source 1..222: mol_type = other DNA
aataaaaatttatattatatagygatggtggtgtttggtggyggtggyggggtggggggtttgattagatgagtygtttttygygttttyggygtygggygttatggttygagtygaaggygtttttggtttyggagygttygyggtttttgygtttggygyggtygtttaagtaggagaagaaggygtagtttaggaatattyggaagtagtaggtygttt

SEQ ID NO: 10424 - DNA, 714 bp, synthetic construct
  misc_feature 1..714: note = Description of Artificial Sequence: Synthetic polynucleotide
  source 1..714: mol_type = other DNA
tgtgattttttttttttgttttaagtggttggygatatagttttyggygygtygggtattgaggttttggagtatagygtggggggtttggtatagataygatttaygatygggtygattttyggttagaaagaattatgtttyggtygttygggtygygggttygyggtgtatttttgtaggtttttattttgtttyggtagaggtttgtaagaattttgtgggtgtttttyggagygggtagaggaggagtttagygtygaggtttaggygygtttygttttygttttttttygtgtttttttttygttgttttttttttaaaggtygagatttggaygttgttyggtggtttyggygggggttttgtttttggtygttgtttttttgaattttaggtgagaagaataaaaygttttgaygttgttyggttttyggtttttggagaggaygggtygtttttgtygagagaattgtgyggaattaggaagygttggtgttttttygtttttaygggattaagygaaattyggttttaaaygaagtaaagtyggttgttttttggagtatttttgttatagtatttttattttgggttagggtattttgttgyggattttgagttttaggaaggaggtttataatagyggaaagttatttttttttaagaattgttgagtttttyggattgtatttttaaagattttttttgaa

SEQ ID NO: 10425 - DNA, 1216 bp, synthetic construct
  misc_feature 1..1216: note = Description of Artificial Sequence: Synthetic polynucleotide
  source 1..1216: mol_type = other DNA
tttattttgaggttttttagatttygtagggttttttaygttattaagtttgtttygattttttttygttgttttttatattttttgtygyggygyggtyggttagggatttatttygaggtttagttggtgggggtgttggggtgygygyggattyggtatttayggyggyggyggyggtagtagtagtaggaggaggagaaagaygaggaggaggaggaggattagttgagyggygttttttttttagttygtagygygtattggttttttggggtattttygggagagtattaagatyggagattaggyggygatataggtaatygttgttgtayggggttgggtttagtyggtttttagaggttagggtagggggaggtaggattgggaaggagggtyggagaagtggggtgtagagggyggggtagygagyggttaggttyggaggaaggygttttaggygtttagggatgtygtygttygggttgaygtygtyggttttttttttygttaggygggygtttgtagtygygggygtaygggtttygtttygtttatyggttygttgtyggygttygyggtgygtttygttttgtgtttttygtagtyggygtgtatttggtgtaagtaaaggyggttagttgatgggtygygygyggattggttgtttygtygtttttttttttttygttygatttttttygyggtttttygttttygttttyggygyggtttygtgttgggtattatttgtggatygtttaataaaggygtagygyggyggggttygggtggtygggtygyggtygtygttttttgtttaggggayggtaggttgyggttgggtagggaggygaagygtattgtyggtttttagtaaaagatagattaaaagaaaatataygttygtgttaggaggttagttaggtataatggggttttatttttttgyggygtagaattygggttygggggttgagaattagatatagttyggtttggggttgtgggagttaagtttyggggtgaaattygattttgygttttaaaatatagggygygttttygggttgtgtgtgygygttygggggygtttttygtagatttggttygggtyggtgtttttgtygygggaaggaggattyggaygtttaatttagyggygaagtygttttttattggaggaggtttttygaaaaygtttttgaaattt

SEQ ID NO: 10426 - DNA, 207 bp, synthetic construct
  misc_feature 1..207: note = Description of Artificial Sequence: Synthetic polynucleotide
  source 1..207: mol_type = other DNA
ggtttgtttagtttttatttyggtatygaagtygtagttttygggtttattttygtatttttaggggttttygggggttgtygataggtttttgattagygagygygttttyggggtaagtatttttggygggtagaaatttgggagyggagtatagyggtgtaagggaatygtgttaggygggaagggyggaatttgyggggaatt

SEQ ID NO: 10427 - DNA, 253 bp, synthetic construct
  misc_feature 1..253: note = Description of Artificial Sequence: Synthetic polynucleotide
  source 1..253: mol_type = other DNA
ggttgygtagygtttttaatttaatttttggatttattttygttttagtttttttygtgtttagygttttttgtaaatgattttttyggtygggtgtttygttttttttttyggtttttttygygtggtttgtttttygttygtttgygttygttyggtttttttgtttttgygtttttatttgatygtaaaggyggttagggtagttttygygyggtttgatagttayggtttttagtttgtttttggaygt

SEQ ID NO: 10428 - DNA, 209 bp, synthetic construct
  misc_feature 1..209: note = Description of Artificial Sequence: Synthetic polynucleotide
  source 1..209: mol_type = other DNA
ggttaggtttgagttttatttatttaygtygtattttttttttttygtgggggtttatatggtygtgtygggygyggtttygygggygyggygatygggygataaygyggyggggayggtygygggttyggttgtggygtatygygagtygaggyggggayggttaggyggygyggggtagtgggyggygtattttttataggtygttc

SEQ ID NO: 10429 - DNA, 225 bp, synthetic construct
  misc_feature 1..225: note = Description of Artificial Sequence: Synthetic polynucleotide
  source 1..225: mol_type = other DNA
ttgygatyggtttttaatttgggtygagttgygtagyggggygggygygyggggyggggygggtygygggttttggggagttggtygggaatyggagttygyggtygtttggtygaatttgttygygyggygtyggggaggagttyggggyggyggygyggggygygygttyggygagggygttttttttagggtygtttgtagtttgygggayggggtygagyg

SEQ ID NO: 10430 - DNA, 1133 bp, synthetic construct
  misc_feature 1..1133: note = Description of Artificial Sequence: Synthetic polynucleotide
  source 1..1133: mol_type = other DNA
ggaggagaagygaygtaagtgggtagttttttagygtyggygaggygygggaggaggagaagtagtggggaggygtagtygtttatttgyggggtagggygyggaggagggattygggttgygygttttygggtygaggaattaggaygygttyggagtttygtaygyggttaagttyggggygtttttttttttyggtygggygaatttaaggggygtagttttttgttttgatagagttggtyggyggaggygtgtagagyggygagtyggygagttaggttgagaaattygagtygggaataaagaggggtyggattgagtgtgtgtgtyggttygagtttygggtagaggtatttgggttygaggttttygttgtgatttttygagatttygtagtgttttttattgyggagttttygygtttgtyggtaaaaattttatttttggtaaatttttttttttttttttttttttttyggtttttattttttgttttttttttttttttagtagattaaatgagtttygagaagaaaaatygaagygaaagggaagaaaataagaagatttaaaayggatatttttagygtgggtggttttttttttttttttttttttttttattttttaggaagtggaygtttygttattttttgatttttgtatttttttttggggtaaayggggtttttttgtttagatttttttttttttttyggaaaataaattattaagtyggtattyggggtaattatagtggagagggttttygyggagaygygtygtyggatttttttttgtattttggggaggygtgttttttttagaatyggygtttttygygygtaaatttyggygaygyggggtygyggggtggtygtyggggtagtttygtttagygygygtygygtagaygttttyggagtygttagttatygtagttttygtygtttagtgtttttyggtttygggggygggygtttgygtyggttttygygaagygggaaagygyggyggtygtygggattygggygtygyggtagttgtttyggttgtyggtyggyggtttygygttygttygtttygttttygttygttgttttgttgtaygaatttttttaatttttttt

SEQ ID NO: 10431 - DNA, 478 bp, synthetic construct
  misc_feature 1..478: note = Description of Artificial Sequence: Synthetic polynucleotide
  source 1..478: mol_type = other DNA
tgaattgagggggttyggyggtygttgaggaggggagygygygggaggaggggygaggagttyggaggygggygyggttggtagtttagagggttygggyggaggtttgagagtagggttggaggggyggaggatyggggagattygttygyggygttttyggtyggttttgagtaggygtygtggtagygttygygttttttgttygtttttygtygtygttaggaygtaggttygygttagggttggyggtagggttygtagttgtyggtttggygtttttatttygygtagtyggtttygtttagttttttygygtttgattggtyggattttgtttttggyggaggtaattgttygyggattttttatttygygattttggttttttygtaagtttttyggattygggygttttyggtttttttttatttatttttttgtygggtaggttygygatttttygtttttygggtyg

SEQ ID NO: 10432 - DNA, 201 bp, synthetic construct
  misc_feature 1..201: note = Description of Artificial Sequence: Synthetic polynucleotide
  source 1..201: mol_type = other DNA
ttaatgtgttttaataygttttaatgtgttgtgataggaaaagagtyggttaayggtattayggaagtattagttggtatagaggttyggtgtaattatygttttgtatygtaaaaygggtttaggaagtttttaggagatattagyggtgttagaatygagaaagtgaygatatagataatttatggatttygygtaygg

SEQ ID NO: 10433 - DNA, 208 bp, synthetic construct
  misc_feature 1..208: note = Description of Artificial Sequence: Synthetic polynucleotide
  source 1..208: mol_type = other DNA
gttttygtygtygttygggtygygttygtttygtttttaggygtyggtttyggagttyggttygygagtagyggyggttgtyggagggaygatgagttgygyggggygggygggttttgttyggttygtygygttygttttgttgatttgtagtttgtggtyggtaygggtagataaygygagttaggagtattatayggygtttatt

SEQ ID NO: 10434 - DNA, 210 bp, synthetic construct
  misc_feature 1..210: note = Description of Artificial Sequence: Synthetic polynucleotide
  source 1..210: mol_type = other DNA
ttagtttttygggaagtagtaggygtayggtygtttggatttttttggaggtgatggtygagygtttgttgtaatgygttaggygggaagtttygtyggygatgygttygaagatgtygttgataaaggaatttatgatttttatggttttagaggagatgtyggtgtyggggtggatttgttttagtattttgtataygtatayggagt

SEQ ID NO: 10435 - DNA, 229 bp, synthetic construct
  misc_feature 1..229: note = Description of Artificial Sequence: Synthetic polynucleotide
  source 1..229: mol_type = other DNA
ttttaagatagggtttttttttygttygggttggagtgyggtggtaygattttyggtygttgtaaygttygtttttgggtttaagtgatttttttgtttyggttttttgagtagttgagattataagygttagttattatagttyggttaatttttgtattttttagtagagatagggttttattatattggttattttggttttaaatttttgagtttaggtgagtta

SEQ ID NO: 10436 - DNA, 209 bp, synthetic construct
  misc_feature 1..209: note = Description of Artificial Sequence: Synthetic polynucleotide
  source 1..209: mol_type = other DNA
tttttttttttttttaatatttttttttagaaaaagaggaaygtaaygaagggagtttagttattatgttggagttgtggatyggttttgtgaggtttaygygggagygyggaggtttttgggttttagggygtyggtagatggtttgtagygtatygttyggttttygygttggttaygttygttagygttatttttttttttygttt

SEQ ID NO: 10437 - DNA, 255 bp, synthetic construct
  misc_feature 1..255: note = Description of Artificial Sequence: Synthetic polynucleotide
  source 1..255: mol_type = other DNA
gttatttygtagygagttaaagttattttttattttgggttygttaygygatttttgtyggttttygttttaygyggttttagtayggygttaaggtttygtttataaatyggtttygttttttygtgttygggttygtygtttattagaygtygtttyggygtagygagttgagggtaygtttatttttttttygggtttttagtttttaaggttttagtataatgttttaggaggaagattttaggttttttt

SEQ ID NO: 10438 - DNA, 297 bp, synthetic construct
  misc_feature 1..297: note = Description of Artificial Sequence: Synthetic polynucleotide
  source 1..297: mol_type = other DNA
tttattattgttaaygtygtygtygygttttttttattttatttttttttttttaggagaatttttagtttyggtttttttygtttyggygtttygttaygtgatttygggtygttttttataygtgatygtttttttttttttttttattttygtattygttttttttttagttttttgtttygttttgttggtygttaggtatttyggggagaggtygtttggaggyggggttttaggttttatttttyggagggtggagaggggygggtaaattaygtygagtgggyggggttt

SEQ ID NO: 10439 - DNA, 232 bp, synthetic construct
  misc_feature 1..232: note = Description of Artificial Sequence: Synthetic polynucleotide
  source 1..232: mol_type = other DNA
tagtygttttaagtttttttttttttttttttttttttttttgtttyggaaagttagygagttttyggtagyggtygtattttygtttyggtggtttgaygayggyggyggtygtttttgygygttttttygttttttttyggtttagtttagaygtygtagtggyggtaattgyggtagyggtggyggttttgatttygygtatttygttttttttttttagttagtttat

SEQ ID NO: 10440 - DNA, 247 bp, synthetic construct
  misc_feature 1..247: note = Description of Artificial Sequence: Synthetic polynucleotide
  source 1..247: mol_type = other DNA
tttttygyggttttttttttttygygtttttttttttatatygggttttyggggtagtagyggggaggggagatyggygggggagggaggatagggaggygaaggaattggggtggggggtgygtgtgtggtggagggggtgggaygatataggtgttttgaggggaggagtygggaggaaggygaggaggtygggttaagtgggggtgyggaggtyggggagataggaaygyggttgygggygygg

SEQ ID NO: 10441 - DNA, 292 bp, synthetic construct
  misc_feature 1..292: note = Description of Artificial Sequence: Synthetic polynucleotide
  source 1..292: mol_type = other DNA
gggygttgaggttgaagttggggtygggggtgggattgggggygttggggttgggtygggggtgggattgaggttgygggygtttaattgggattgagtygagggtagyggtggggttgggtygggggagtaggggtygygtygggtagygtygygtgttggagyggaggygggtgyggtyggggtaggtygygggaggaggaagygtttggggagtaggagttgggtygggygggttygygtttygtattygygggggtgaatyggagtygtygtagggggttyggggggt

SEQ ID NO: 10442 - DNA, 201 bp, synthetic construct
  misc_feature 1..201: note = Description of Artificial Sequence: Synthetic polynucleotide
  source 1..201: mol_type = other DNA
tgttgtggggtttagggttgtatggggtagtaaggygygggggttygggtygtagagttttyggggaggattyggaggggaggtagtggttyggyggttygggttatagttyggtgtggtgggggggagggagayggggygggagagggggtaaggttgtttttgaagggaattagttggttygttygttggtygagttgt

SEQ ID NO: 10443 - DNA, 201 bp, synthetic construct
  misc_feature 1..201: note = Description of Artificial Sequence: Synthetic polynucleotide
  source 1..201: mol_type = other DNA
atttttgttttttatatttattttttattttygttttagaaataygttttttatatygggttygtyggatttttatattttttattygygttagaaaygygygtattttygtggtttttttttgtygygygtaaataygttyggttygygtaygttttttyggtttggtttygtatattygygttagaaataygygtggtc

SEQ ID NO: 10444 - DNA, 201 bp, synthetic construct
  misc_feature 1..201: note = Description of Artificial Sequence: Synthetic polynucleotide
  source 1..201: mol_type = other DNA
ygaygttygagttagyggagttyggagtygttgggtttttygtttttttygttygttygtttttttygttttttyggtttttttygtttygtygttttgygtygttttattataaaaggtgaggttyggggggagggggygygggattttygtttygyggaagyggtttttatttgttttttaatttgttyggtygygttt

SEQ ID NO: 10445 - DNA, 201 bp, synthetic construct
  misc_feature 1..201: note = Description of Artificial Sequence: Synthetic polynucleotide
  source 1..201: mol_type = other DNA
gttttattaagyggttttagttataayggygtgtatgttaattaygtttgtaggttatygttygttttyggttgtyggattatttagygygttttttttygagtttyggayggggagaggaggagttaggggaggaggygggaggaagggaaggatggggaggataatgggggaagaagagggaggatggaggaagggggt

SEQ ID NO: 10446 - DNA, 201 bp, synthetic construct
  misc_feature 1..201: note = Description of Artificial Sequence: Synthetic polynucleotide
  source 1..201: mol_type = other DNA
tattatttygttgtyggyggygtttttttgggaagtagtagtaattggtggagttggagtygtagtagtttgagtygtygtagtagtttttgtyggagtygtagtaggaggaggaggaggygggygtyggggtgggygtyggggygggatayggagyggggttttgggaygattttttggaaaagtttttggyggaaaygg

SEQ ID NO: 10447 - DNA, 201 bp, synthetic construct
  misc_feature 1..201: note = Description of Artificial Sequence: Synthetic polynucleotide
  source 1..201: mol_type = other DNA
gggyggggtyggaggaaaaggggyggggyggyggggaaaatataaattaaaatttaaaaattagttaaaggaaggatggaagtttygyggttttttyggygtttagyggtgtttttgttttggtgttyggattttagttygyggtttgtttgtttgttagtttygtggatatygtattgtygggtagygtttyggtygtat

SEQ ID NO: 10448 - DNA, 201 bp, synthetic construct
  misc_feature 1..201: note = Description of Artificial Sequence: Synthetic polynucleotide
  source 1..201: mol_type = other DNA
tagtatgatgtygtttttttggtagtggtagggggtygggtaggyggtgggtttygggtygggttggggggygtygtyggtttttygggaagygtatagygyggygtaaagttatagygttyggagtttyggygggttgggtatttyggyggtygggttattggggtatttggyggtygggygyggaygtayggygygatg

SEQ ID NO: 10449 - DNA, 241 bp, synthetic construct
  misc_feature 1..241: note = Description of Artificial Sequence: Synthetic polynucleotide
  source 1..241: mol_type = other DNA
ygaagaaaggggygygggggygygggggygygggggygygtggggygttgggygtyggaggtttggtaggatgygyggtggggtygtygtygtygtygtygttgygygttygttttttggtygggygygygtttygtttygtagtatttatagggygtygyggtttygtttttttataggtttygtttyggttagtttaygtttygttttyggtttygttttttgtygttagggygygtag

SEQ ID NO: 10450 - DNA, 201 bp, synthetic construct
  misc_feature 1..201: note = Description of Artificial Sequence: Synthetic polynucleotide
  source 1..201: mol_type = other DNA
gtygttgtygttttgtygttyggtgtgygagygygttaaggtyggttgygygtygtttatgygttagtayggtttygtttggttygatygtatgygttgygatyggttgttygagtaaggtaattttgataygttgtgtatggattataatygtatygatttaattatygtygygtttagttygtygygtygtttgtygtc

SEQ ID NO: 10451 - DNA, 201 bp, synthetic construct
  misc_feature 1..201: note = Description of Artificial Sequence: Synthetic polynucleotide
  source 1..201: mol_type = other DNA
agaggaagtgagaggtgtttaattyggttatgtagaaygtagttgggttgttygaaaygaaataaagyggttatttygaaggaggtgttgtttttgggtyggtttaggttgagttagagtagaygttatttttaygttaaaaatattaggttattgttttagggagttgggttatttattgaggttatttttattttattt

SEQ ID NO: 10452 - DNA, 201 bp, synthetic construct
  misc_feature 1..201: note = Description of Artificial Sequence: Synthetic polynucleotide
  source 1..201: mol_type = other DNA
gtatttatttttttgayggtttygtttygtagggagggtttgtgtyggttgttggagtttattygtagatttatttttattattttygagggttagaggygygatttygygtattyggygtttygtttgttgygttagtatygttatttggtgattttgttgttttggaggttyggtttygtggtgyggagtaggygyggg

SEQ ID NO: 10453 - DNA, 201 bp, synthetic construct
  misc_feature 1..201: note = Description of Artificial Sequence: Synthetic polynucleotide
  source 1..201: mol_type = other DNA
ggtttttggagttattggtttagggygggttygygggatggggygggyggttyggggygtagtyggttaggtygttgttatggtaaygyggtggaaaaaygggtttttgggtatttygttgtyggtyggttggtaattttttagyggagggatygggtygagttygyggattttttygagtgttttttggggtttagtygt

SEQ ID NO: 10454 - DNA, 201 bp, synthetic construct
  misc_feature 1..201: note = Description of Artificial Sequence: Synthetic polynucleotide
  source 1..201: mol_type = other DNA
ttaaaagtagtttttttgaattttatttgggttttgtagggttttttygaggttygagaattgggagaagggaaagagtttatyggtttgtttgaaggtyggygggyggtgtaggtagttttttttagatttttttagtttyggttttttaygtatattagaagagtygttttttttttttagtgattgaaattatttgga

SEQ ID NO: 10455 - DNA, 201 bp, synthetic construct
  misc_feature 1..201: note = Description of Artificial Sequence: Synthetic polynucleotide
  source 1..201: mol_type = other DNA
ggttttgttttagggttttgtattttygagagttgttgtatgtyggggattggtttttaagtttgtttgagtttttttagtttttygggtatygttatgyggtgggagggtgagttttttttttttgttgaaatttyggyggtttggtaatyggtyggggggttttggatttttyggggagatattattgatgttttgtgg

SEQ ID NO: 10456 - DNA, 201 bp, synthetic construct
  misc_feature 1..201: note = Description of Artificial Sequence: Synthetic polynucleotide
  source 1..201: mol_type = other DNA
gtgtttttygttgatttttagaggagatattggttagggttttttttttygagataaattttattttggaaaggttgttagatygggygyggtgatttaygtttgtaattttagtattttgggaggatgaggtgggyggattgtttgagtttaggagttygaaattattttgggtaatatgttgaaatttygtttttatta

SEQ ID NO: 10457 - DNA, 201 bp, synthetic construct
  misc_feature 1..201: note = Description of Artificial Sequence: Synthetic polynucleotide
  source 1..201: mol_type = other DNA
gtatatttyggtygggtgygggtyggyggggtatagyggtttttayggttygttttygttagttatttttyggttttttttttygttgttygygtgtttygggtyggtttagtatttttygagttaygtgttygygtttttyggyggggaggagygtagtygygggggygygtttyggtgatttygttttttagttttttt

SEQ ID NO: 10458 - DNA, 201 bp, synthetic construct
  misc_feature 1..201: note = Description of Artificial Sequence: Synthetic polynucleotide
  source 1..201: mol_type = other DNA
ttttygygtatygtygtygygtatttatttttaygggtggagyggggyggggtagtayggtttygygygtagtttygattygttaggygtatygatyggyggygtagygttggygygayggttygattyggtygggtttttgtttygggygygggttyggtttgggagygggygagttygtttgtaggggaggyggggatt

SEQ ID NO: 10459 - DNA, 201 bp, synthetic construct
  misc_feature 1..201: note = Description of Artificial Sequence: Synthetic polynucleotide
  source 1..201: mol_type = other DNA
ggggyggagyggggaggggyggggyggagyggggaggggyggggyggagaaggatygtagggttgagyggggygttagygttagtgttyggtattgtttygggttgggttttttgygttagaggaaggggagttyggggayggggtayggggttygygaggtaygggtgttttttyggggtttyggaagttttttttttyg

SEQ ID NO: 10460 - DNA, 239 bp, synthetic construct
  misc_feature 1..239: note = Description of Artificial Sequence: Synthetic polynucleotide
  source 1..239: mol_type = other DNA
gagaggaagggggaaggagatagaggaatygagattggggtgagggagyggtygygygtggttttyggagaggygtttattatttgygtggygttttttygygtyggagtgyggttttgtttttagygttagtgygtygygyggttygtyggtttygtaggattggttatygttttttatttatgtaatttgygtgtgygtgtgygtgtgtgtgtgtgtttttttttygttygtttttt

SEQ ID NO: 10461 - DNA, 201 bp, synthetic construct
  misc_feature 1..201: note = Description of Artificial Sequence: Synthetic polynucleotide
  source 1..201: mol_type = other DNA
ttttttygtgggtggttttygtgagttttttggttagtttttttattttagttttataatggtttatygtttgtaatattttttttgyggttatagtttyggtggatggaggtaggagggggttayggggtgggggagatggatgygaagttggyggggaaagggagaaggaaatgggaagggatgggtggaaayggaaaa

SEQ ID NO: 10462 - DNA, 201 bp, synthetic construct
  misc_feature 1..201: note = Description of Artificial Sequence: Synthetic polynucleotide
  source 1..201: mol_type = other DNA
ttatttgaaattgataggtttgttttttatgataatagttgttattaattagttttttttatatttttttatttatyggttttagtattttgtatatttygyggagaattygtttttggttttttatagagtatagtattagggtgtagattattatatttatagagttattagttatttggtgtatgtttttttyggtag

SEQ ID NO: 10463 - DNA, 201 bp, synthetic construct
  misc_feature 1..201: note = Description of Artificial Sequence: Synthetic polynucleotide
  source 1..201: mol_type = other DNA
aaaatagtagttttatggaaaataatagaaaaaaattttattttagtttggtaattaayggttggtygggggaygtgttygygttgtttttttttyggtygttagggggygtaggaagaagttttggaggtttgtttygggatygygtattygtttttttttttygttagttttttttttattttygttgagtttygtttc

SEQ ID NO: 10464 - DNA, 201 bp, synthetic construct
  misc_feature 1..201: note = Description of Artificial Sequence: Synthetic polynucleotide
  source 1..201: mol_type = other DNA
gtttgaygaagttttttttgggggtygatgttttttttygggtgggaaggggygttgtyggtgagggttattttggygtyggtttgygtygttygaagtygggggggaggggaggttttygtttagtaggggttaygttygtttyggaygggggtygygygggygtttaggygaygtattttygtyggggttygtgatygt

SEQ ID NO: 10465 - DNA, 201 bp, synthetic construct
  misc_feature 1..201: note = Description of Artificial Sequence: Synthetic polynucleotide
  source 1..201: mol_type = other DNA
ttttgagaagtaatagatttygattaatgtgtatygttttygyggygtttygtygygttyggaatygttgtttatttggygttyggtaaggaaggttgtyggagggtttataggtgtttttttygttttyggagaagttyggtgtgggyggygttattttagaaaygttatyggygygtttgtttygagyggygggggyga

SEQ ID NO: 10466 - DNA, 201 bp, synthetic construct
  misc_feature 1..201: note = Description of Artificial Sequence: Synthetic polynucleotide
  source 1..201: mol_type = other DNA
tttgttatttgtatttaagatggatttttygttgtygtygttgttttttyggtttttttgttattattttttaygttttgtagttttgttttttgtttaygggttgttaagtygyggtttggtyggtggtggtagtggyggagttagataaagttttygtttttttygttttagagttttttaggygttttaagtggyggg

SEQ ID NO: 10467 - DNA, 201 bp, synthetic construct
  misc_feature 1..201: note = Description of Artificial Sequence: Synthetic polynucleotide
  source 1..201: mol_type = other DNA
ttttagggyggtygtttttattttyggtttttatttagyggggatttattagggygagggttgaagatttygygggaygtygygygtyggggatagygaygtatttatttttttagttatttgggaggttgtaggttygggtyggagttygaggtttaggggygygyggagtagttttggttaaggygtagggygyggggt

SEQ ID NO: 10468 - DNA, 201 bp, synthetic construct
  misc_feature 1..201: note = Description of Artificial Sequence: Synthetic polynucleotide
  source 1..201: mol_type = other DNA
ttttggggtygggyggggyggggyggggtaggggggtygggygyggtttaygygttttttygagtgygyggtgygggaygggygyggttgaygygttttygtyggtgtttgtgttttttygtaggttaggagggtattttgygttgttattyggatttggygggtagygagttgtagyggggtaygtttayggtygagtyg

SEQ ID NO: 10469 - DNA, 201 bp, synthetic construct
  misc_feature 1..201: note = Description of Artificial Sequence: Synthetic polynucleotide
  source 1..201: mol_type = other DNA
ygggtttggataggttagtttgagagtatgygaagtyggttttygggtagataataagagatatygtygggaagtgttaggaatttygygygttgttygyggggtttttttgtagtyggggttgggttagaaggatggtaaagttgygyggygtygttygggttggagtygtagtygaggagtygaagtttttttaggtyg

SEQ ID NO: 10470 - DNA, 201 bp, synthetic construct
  misc_feature 1..201: note = Description of Artificial Sequence: Synthetic polynucleotide
  source 1..201: mol_type = other DNA
gattyggagttaygyggggygggggtyggtatygagggtygggaggygygaagggtaygyggyggygggaagyggggygattygaaggtttaygggggtygggaggttgyggggygttygggattttttttygggtggttatygtgyggtyggggygyggaagttagaggtgtttagaggygtygatttygtygaggttgc

SEQ ID NO: 10471 - DNA, 201 bp, synthetic construct
  misc_feature 1..201: note = Description of Artificial Sequence: Synthetic polynucleotide
  source 1..201: mol_type = other DNA
tagtygaggtagaaattygtttygaggygygggygtygggttygggttttaaggatgygygtygggttttttttygyggggatagtygagtttygtyggygttttaggtgttttygtagtgygttygggygyggaygtttttttgttttyggaggggaagygggagggtttttggggtaaygtttygatttygggtttttt

SEQ ID NO: 10472 - DNA, 201 bp, synthetic construct
  misc_feature 1..201: note = Description of Artificial Sequence: Synthetic polynucleotide
  source 1..201: mol_type = other DNA
tataggtgttttygtygtaggtttygtatatttatttatggtatttatataggggttygaagaatatgttyggtttagttaygtggtagatgtagaygtygtagtygtagyggtttyggtygtggtatagygyggttttygggggttgtttaggtgygyggtagygtygtttygattyggttygggatagtttgtaggygg

SEQ ID NO: 10473 - DNA, 201 bp, synthetic construct
  misc_feature 1..201: note = Description of Artificial Sequence: Synthetic polynucleotide
  source 1..201: mol_type = other DNA
agatygttgtttggttattttaygtttttgagttttttatatagttagtttygtgattttygagtttygtgattttygagtttygtgatttttaagtttyggaagtygttgtaggtagyggtttagttaggtttygttttttttatyggagttttaygygttaattttagttaggtttygttttyggtygttttaggygtg

SEQ ID NO: 10474 - DNA, 201 bp, synthetic construct
  misc_feature 1..201: note = Description of Artificial Sequence: Synthetic polynucleotide
  source 1..201: mol_type = other DNA
gtagtagtttatygaggayggggattygtaagtggyggaggttyggggttgggggtygtygggagggygggaygygygyggtttgggggtgggaggygtygggtttggagttygagtygggggattagygatgtagtygggygggygtygyggtatttyggggtttttgtatygtttygaaygttgtagggttgtagggtc

SEQ ID NO: 10475 - DNA, 201 bp, synthetic construct
  misc_feature 1..201: note = Description of Artificial Sequence: Synthetic polynucleotide
  source 1..201: mol_type = other DNA
attttgtaggtygtatttttaattygtattttatttaggttttygtttggygtygatttgttttagtttaattttyggtttygtagattaggtatttttygggaygyggggtagattttgygttygggttttttttygtagtygggttgttyggtttttgygygygtataataggyggtayggygtagttttygggagygc

SEQ ID NO: 10476 - DNA, 201 bp, synthetic construct
  misc_feature 1..201: note = Description of Artificial Sequence: Synthetic polynucleotide
  source 1..201: mol_type = other DNA
aggatggygatggtattggygyggattttttttatggtgggtagaygggygttttaggtgggggattgggtyggygtgttttyggggtyggggygggggygttygtagttttagttgtttgttttygttygygtttagttgtttagttttgtagagtagaaaaaggagagaggtgggggggygggggggtgatagggagag

SEQ ID NO: 10477 - DNA, 201 bp, synthetic construct
  misc_feature 1..201: note = Description of Artificial Sequence: Synthetic polynucleotide
  source 1..201: mol_type = other DNA
ttagttttttttgagggagtttagyggtgygggttygtttttttttagtttagtttttttgatatygttttttttttggggaygttgtttgygggttygygygttttygttttygatttttttgtaggttttttygggggtyggggtaggatygtatttatygaggattygggygttggagttagtagtagyggtaygagt

SEQ ID NO: 10478 - DNA, 201 bp, synthetic construct
  misc_feature 1..201: note = Description of Artificial Sequence: Synthetic polynucleotide
  source 1..201: mol_type = other DNA
taagtygaagtttttgaaggaggttyggtgttatttyggtgtgatygygtttyggygaygttgggtagggtgtagggagttagttyggtygyggtttagygggaggggagggggtyggtttygaattygggygttygggtygygggtgatttattgggaaygttaggttygygygtttagatyggygggygaygtttagyg

SEQ ID NO: 10479 - DNA, 201 bp, synthetic construct
  misc_feature 1..201: note = Description of Artificial Sequence: Synthetic polynucleotide
  source 1..201: mol_type = other DNA
gggggttyggtttagggygggaaatgggtggggaggggyggggtttgggttggagattggayggaggagtygggyggagatgtaattggaggaagagggygggayggggyggagaaggtttttygtatyggyggagggagagggattaggagggggttgyggygggggaggagagggggttttyggtttagagattgaggc

SEQ ID NO: 10480 - DNA, 201 bp, synthetic construct
  misc_feature 1..201: note = Description of Artificial Sequence: Synthetic polynucleotide
  source 1..201: mol_type = other DNA
gygatttttgttttttttttgggtygagyggtaggygygttygtatygttttygttttttygtygtagtygttgtygatyggttggttgggttttgyggygtgaggatttyggyggygtygtagtttygygagttatggtttagttyggyggggaggttyggttygggtttaagayggyggtgtagattygygtygttatt

SEQ ID NO: 10481 - DNA, 201 bp, synthetic construct
  misc_feature 1..201: note = Description of Artificial Sequence: Synthetic polynucleotide
  source 1..201: mol_type = other DNA
tttatgaatatttyggggygygggagttygagygttgtyggagggygtttygggggaggyggtygttgatgtaagttyggygggtygttgggtttygttyggttgyggygggagtttygggaygggtyggaygggtyggggtagaggaggygaggygagttygygggtggttagttataaagttygggyggygagatagac

SEQ ID NO: 10482 - DNA, 241 bp, synthetic construct
  misc_feature 1..241: note = Description of Artificial Sequence: Synthetic polynucleotide
  source 1..241: mol_type = other DNA
ttttatttttatatatttatattyggtygtttttygtttttttattygtttgtygygygygygygygatttygtttatatatagygygygygaygtyggyggagatygtttygtttttttagatygaaygtygttygttygtttgttgaggagyggygygygtttyggtttygtttttttggygtygyggygyggygggyggggggyggyggtyggaggagttgggggtygggttagygyg

SEQ ID NO: 10483 - DNA, 201 bp, synthetic construct
  misc_feature 1..201: note = Description of Artificial Sequence: Synthetic polynucleotide
  source 1..201: mol_type = other DNA
ttttygtygttttttaggtttttagtgaggttttttagttggtygtttattatggtttttattatgaaygttatggttttygtyggtyggggtatygggygtttgttattaygygttaggtatygggtaygttygygtttattttagtattaggtttygyggatagttttygtygygggttygygttttaygtttggtatc

SEQ ID NO: 10484 - DNA, 201 bp, synthetic construct
  misc_feature 1..201: note = Description of Artificial Sequence: Synthetic polynucleotide
  source 1..201: mol_type = other DNA
gattyggtatgaggagttyggtatttttgttttttagttttttggaagtttttttttggattggtyggygtygttttttygatatttgggggttgaggtyggtatttygggtttgygtggaggggygagygttaaggttgygagagtygggtttygatttgtaattattttttttaatttttatggagtttygtttygygt

SEQ ID NO: 10485 - DNA, 201 bp, synthetic construct
  misc_feature 1..201: note = Description of Artificial Sequence: Synthetic polynucleotide
  source 1..201: mol_type = other DNA
gygttyggtagagagtttttagtygtttyggatttygygtagtttygtagagaygygygtgtygttygtaygggtyggtattygggtygttttygtyggygtgttaggatttygtatagaagygttyggaygyggaygtaygtagtygyggttaygattttygtygttygttyggttygtgttyggttttggttagtaggg

SEQ ID NO: 10486 - DNA, 201 bp, synthetic construct
  misc_feature 1..201: note = Description of Artificial Sequence: Synthetic polynucleotide
  source 1..201: mol_type = other DNA
ttttttyggttttttttttatttttygttttyggggtttttttttgttgagygggggttgtygggatttgggattgyggggttgtttygatttygtagtygttygyggtggaagttagttygggtttggttttgagygygyggttggggyggtygttgtttatggtgttggygygggtggygygtyggtyggyggggtttg

SEQ ID NO: 10487 - DNA, 201 bp, synthetic construct
  misc_feature 1..201: note = Description of Artificial Sequence: Synthetic polynucleotide
  source 1..201: mol_type = other DNA
tygttygygtattggggttttygaggtgtgatgttatttgttygtagaatyggtttttttygygtygtttttttygygtttttattttagtttttttttygtygttttyggggttaatatggtagyggygtygtygttttattttygtaatygtaygattyggttggtagggtygtyggttyggattttygagatttatat

SEQ ID NO: 10488 - DNA, 201 bp, synthetic construct
  misc_feature 1..201: note = Description of Artificial Sequence: Synthetic polynucleotide
  source 1..201: mol_type = other DNA
tygygggygyggtttttggaayggattttttttygagtygygttygtygggtygtttttttttygttygtagatttyggttyggtttygtygtygygygygttttttttygttttggttttttttttttygttttygggtttyggygttttygttyggttygagygygyggtttgtttygttyggtttattatggygyggt

SEQ ID NO: 10489 - DNA, 201 bp, synthetic construct
  misc_feature 1..201: note = Description of Artificial Sequence: Synthetic polynucleotide
  source 1..201: mol_type = other DNA
ggttaggttttttaggagtagttggggaatattyggygattttggyggttgttttttggtggygtagggagttygygtgtttgygagtgygtgtgtgtgygaagtttttygggtaagtgtgttagygygygtttgggtgtgtgtaagggtgtgagygtgtataygtgggtaygggygtgtgygygygggggtgttyggttg

SEQ ID NO: 10490 - DNA, 201 bp, synthetic construct
  misc_feature 1..201: note = Description of Artificial Sequence: Synthetic polynucleotide
  source 1..201: mol_type = other DNA
tttygtttttattygttttttttatygygtygttttttygttttgttttgygggtttaggyggaattyggaayggtygtttttttttttygtttttygtygtygttttttttttttttttttyggttttttttttagtttygggtyggagyggggtgtyggyggyggtyggttygggyggyggygtttggttatgtygtgt

SEQ ID NO: 10491 - DNA, 201 bp, synthetic construct
  misc_feature 1..201: note = Description of Artificial Sequence: Synthetic polynucleotide
  source 1..201: mol_type = other DNA
ttaagttygttgggygttygtttttgygtatygygttygtttttttygtttgtgygtttgggtttyggygtaygtattgtatttgtygttygtttttgtygtgtgtgtgtattgtyggggttygttygtttaygttygygygtgygtttttatttttatttygtattygygtgtaygatttattygtygtygttgtgygyg

SEQ ID NO: 10492 - DNA, 201 bp, synthetic construct
  misc_feature 1..201: note = Description of Artificial Sequence: Synthetic polynucleotide
  source 1..201: mol_type = other DNA
tgtygaatgaagttgagygttttagtggaattagggattttaggggtgagygatygygaggggagagygaygaaaagggyggtyggagttggaggggygyggagttaaataaaaaagggyggtyggagttgtaggggygtygagttaaataygttatttttagatggggggttttaggygagttgtttagtttttttgagg

SEQ ID NO: 10493 - DNA, 219 bp, synthetic construct
  misc_feature 1..219: note = Description of Artificial Sequence: Synthetic polynucleotide
  source 1..219: mol_type = other DNA
cgtttgtttcgtcgttcgtatcggtttagttttcggcgttcgttcgtttttttcgttcggagcgttgtgagttaggagtagtcgtaggtttttcggacgcgttcgtcgcgcgtattacgtggttcggaggcggtcgttagtttgcgttcgcgatcgggggcggacgttgtattatcggttcggagttgggtaggggaggtttttcgttttttttttagg

SEQ ID NO: 10494 - DNA, 315 bp, synthetic construct
  misc_feature 1..315: note = Description of Artificial Sequence: Synthetic polynucleotide
  source 1..315: mol_type = other DNA
gacgttttttagagacggcgttggtttttttcggcggggttggcggcggttgggggatgttagtcgggcgggtcgcgggtcgtttttttttataggtttcgagagcggggcggggttgggggcgggcggggagttgtttcgggtggtttcgtttttagtacggaggatttttttcgcgaggcgtcgtcgttttggagtttcgtttacggcgttcgacggtcggggaaattgcgggagttgggcgtttagtgggggaaaacgagtcgcggacgcgaaggggcgggatgaggttttcggggcggggttcggggttcg

SEQ ID NO: 10495 - DNA, 201 bp, synthetic construct
  misc_feature 1..201: note = Description of Artificial Sequence: Synthetic polynucleotide
  source 1..201: mol_type = other DNA
cgcgtcgttttagcgttttgtagcggaggcgtcgtttttatttcgatcgtaggttcgttcgggtcgttcgttcgtcgggtatcgagtcgttttgtcgcgcgttgcgtttcggggcggggtgggaggagagggagtagtcgttattttgtttaggtcgtcgcgggttagttttgtagttagttttagttttgggtcgggtgt

SEQ ID NO: 10496 - DNA, 201 bp, synthetic construct
  misc_feature 1..201: note = Description of Artificial Sequence: Synthetic polynucleotide
  source 1..201: mol_type = other DNA
gttcggagcggtcgtgaggggcggacggggggtttcggggcgggtttgtaggttttggggatttgaggttgtcgggaggggttgttagggggcgttggtcgggcgtcgggttttgcggagttggggcgtcgatttttgattcgcgagaggggcgttttcgtcgtgttggtcgtagttgttatttttagcgtttttattatt

SEQ ID NO: 10497 - DNA, 201 bp, synthetic construct
  misc_feature 1..201: note = Description of Artificial Sequence: Synthetic polynucleotide
  source 1..201: mol_type = other DNA
cggcggtgattgcggtttcgcgcgcggttcggtttaggtaggattcgaagcgcggtttcgggcggcggcggcggcggcggcggcgtggtttcgttcgggcgggttttgcgggataagacggggagtcggttacggggtggggcgattggcgtttcgggagtaggaggagaatcgcgggtaggcgggcggggagggtgcgcg

SEQ ID NO: 10498 - DNA, 201 bp, synthetic construct
  misc_feature 1..201: note = Description of Artificial Sequence: Synthetic polynucleotide
  source 1..201: mol_type = other DNA
aagtttttcgtttagttttgtcggttcggtttgggcgttgtggatcggtaatagtagttttattaggatgtaggtcggattaagtttttggggaaaattcgttgtaataattgttttttatatataatttttaattttttttttattttcgtttttaattcggagatttgtaaagtttaagaaagggaaaagtaattttat

SEQ ID NO: 10499 - DNA, 201 bp, synthetic construct
  misc_feature 1..201: note = Description of Artificial Sequence: Synthetic polynucleotide
  source 1..201: mol_type = other DNA
tagtatcgtttcggtttcgcgttaggcggcgggggaggggaggagggatttttttaggggtgggtttggagggggtgggggcggttttttttttcgtttcgtcgcgggtttattgttcgggaggggcggggagatagtggggggtagtttcgggcgggagtggaggcggagatgtcgtcgtcgtagtcgtcgcggtggttg

SEQ ID NO: 10500 - DNA, 201 bp, synthetic construct
  misc_feature 1..201: note = Description of Artificial Sequence: Synthetic polynucleotide
  source 1..201: mol_type = other DNA
ttttatgacgtcgaattgtttgggggatcgttagcggtgcgtcggtcggagttagttggtggcggggcgggcggttcggagtgtttgtttaattttgagcgttcgcgagggggaggggaggtagttggttacgggttagggggtagtaaggtggaggagcgggggttgggaaaggggagggtatttttcgggttgtttgtt

SEQ ID NO: 10501 - DNA, 201 bp, synthetic construct
  misc_feature 1..201: note = Description of Artificial Sequence: Synthetic polynucleotide
  source 1..201: mol_type = other DNA
ttttttcgttttagttagacggggcgttcgcgttttttttttcgtttcgcgttggtttttaataggaagtcgtttcggtttttagtacgtgatttttatcgtatttgtatatcggagggcgaattggttaatcggtattttgtatttgagtttttttttcgcgcgtttttttcggtttattggtttttcggttaggttacg

SEQ ID NO: 10502 - DNA, 201 bp, synthetic construct
  misc_feature 1..201: note = Description of Artificial Sequence: Synthetic polynucleotide
  source 1..201: mol_type = other DNA
gtcgttatcgttatcgtagttgtagcgtttttttatatttttagcgcgtcgtcggtcgggtagtttggtcgcggtacggaggaggggttttggagggggcggtcgggggaggcgacgtcgagttatcgttttcgggtagtcgtcgtcgggggggagcgcggagatttgaaagggcgcgtcgggtaacgttttttttttttt

SEQ ID NO: 10503 - DNA, 201 bp, synthetic construct
  misc_feature 1..201: note = Description of Artificial Sequence: Synthetic polynucleotide
  source 1..201: mol_type = other DNA
ttattgttttttgggcggtgtggattagttgtagagtgtgatttgcggttagggagtgttttttcggagttttcgtttttagatttttggtgttaaagacgttttgtgagcgggtggggtcgggcgttttagttacggcggtcgtcgtttttttttttcgtaggacgggatagcgtttttgtggatcgcgttttagatggg

SEQ ID NO: 10504 - DNA, 201 bp, synthetic construct
  misc_feature 1..201: note = Description of Artificial Sequence: Synthetic polynucleotide
  source 1..201: mol_type = other DNA
cgtggaggcgataggcgtcggcgataattttttagttcgggcgtcgcgcgtcgtttcgcgggacgcgtattggggatttcggtcgtttttttcgtttttcgcgcggatataaagttcggtagtcgcggcgtttagagggtcgagggttatcggatagttcgggtagattttggattcgtttcgcgggagttgtttttttgt

SEQ ID NO: 10505 - DNA, 243 bp, synthetic construct
  misc_feature 1..243: note = Description of Artificial Sequence: Synthetic polynucleotide
  source 1..243: mol_type = other DNA
aaggttggagggtgttagaaagatgatcggtcgggtacggagcggggagttcggagtcgcgcgtggggaggggaggtggaggagggggcgtcgggggagcggggggcgcgtgaggggtgcgagcggggttcggggggcgcgcggtgggtgtggggggcgtcgggtttatttatttttcgttagcgtcgttattgtcggttatatgattgaggttgttgttgggatgacggttcgggttttagt

SEQ ID NO: 10506 - DNA, 201 bp, synthetic construct
  misc_feature 1..201: note = Description of Artificial Sequence: Synthetic polynucleotide
  source 1..201: mol_type = other DNA
ttttgtatttgtaatttttcggggtagtgatatagttggtttcggtgttttggcggagggtagaagtgatggtcggttgcggttttgtagggtgagaatcgggttagataagtgagtgttttagagtcggggagttgtatacggaggggagggagtggcgggcgttgcgtcgggtttttttaggaagaggtgagcgggttg

SEQ ID NO: 10507 - DNA, 201 bp, synthetic construct
  misc_feature 1..201: note = Description of Artificial Sequence: Synthetic polynucleotide
  source 1..201: mol_type = other DNA
cgaatgtggttaagggggtcgtttagatgggtgtagatacggttaagatcgtgttgatcggtattaaggatattgtttgtagtggggttatcggtgttgcgaacgtggttaagggtgttgtgtaaattgggttgaaaacgatttaaaatatcgtaataggtataaagaatatttttggtagtggggtgatcggtgttgcga

SEQ ID NO: 10508 - DNA, 201 bp, synthetic construct
  misc_feature 1..201: note = Description of Artificial Sequence: Synthetic polynucleotide
  source 1..201: mol_type = other DNA
gtcgcgtttttgggaacggttagggaagtaagtagaagtcgggaagtcgcgaaagaggcgagaaagtgcgattttttttttagattttcggtttttcgtcgaaatttttgtcggtcggttaaattttagataatggaagttttacgtttttatttttatttttttttataagttcggtcgcgggtttttttcggttcggga

SEQ ID NO: 10509 - DNA, 201 bp, synthetic construct
  misc_feature 1..201: note = Description of Artificial Sequence: Synthetic polynucleotide
  source 1..201: mol_type = other DNA
tgtgacgattttttaagggggttttgtgagtattttttttttatagttaggaaattgaggtatagaagggagggattgtttggtaggagttaatagaggcgtatagagtagcgtgatgagtttcgggttttgggggcgggttcgcgagtaggtagtttttattttatggtggatttttaggtttttttttttgtttcggtt

SEQ ID NO: 10510 - DNA, 201 bp, synthetic construct
  misc_feature 1..201: note = Description of Artificial Sequence: Synthetic polynucleotide
  source 1..201: mol_type = other DNA
tacggagtttttttacgcgtttattgcggtttcgtcgtgttaaggggagtttggttgtttacgggttttatttgttagcgagaagatagtttggtcgggcggttgattttattttgtaattttgatattgtgtttttcgggtttgtcggttttatgatttgtgtttaaagtttgatttttcgtagattaggtaaaagttaa

SEQ ID NO: 10511 - DNA, 201 bp, synthetic construct
  misc_feature 1..201: note = Description of Artificial Sequence: Synthetic polynucleotide
  source 1..201: mol_type = other DNA
ttttgtgtttttacggcgcgtagaggcggcgtcgcgaattttgtgtgtattttatacgacggcggggattgaggtttttcgtagtttagagtcggagttcggggtcggtcgagttcgtaggatcggttttttcgtcgatttttacggttttatttagttttttgggtttatggcggcgtcggcgttggtgagtggagggtt

SEQ ID NO: 10512 - DNA, 201 bp, synthetic construct
  misc_feature 1..201: note = Description of Artificial Sequence: Synthetic polynucleotide
  source 1..201: mol_type = other DNA
ttatcgtagtcgatagttttataaatattatcgttcgtttagttttcgttttttcgggtcggttgttatttcgcgttttcggtttggttttggtttcgtcggttgtattgtacggttcgttttttcgtttatttgtttattaattttgtagacgttttgtgtttattttttttttttttttggttattttttttttttgtt

SEQ ID NO: 10513 - DNA, 201 bp, synthetic construct
  misc_feature 1..201: note = Description of Artificial Sequence: Synthetic polynucleotide
  source 1..201: mol_type = other DNA
ggcgtttttttcgttcgtttgcgggttcgttgcgttagtcgtcgtaataaagtttgatagggcgtggtttcgcgggaagcgggttcggcgttgttcggtcggggcgtaggcggttcggttcgggttttttcggtagcgtcgagtttagggttttttaattcgttatcgtcgtcgtttgtttcgtcggggcgttttagtttt

SEQ ID NO: 10514 - DNA, 201 bp, synthetic construct
  misc_feature 1..201: note = Description of Artificial Sequence: Synthetic polynucleotide
  source 1..201: mol_type = other DNA
aaaataaaggatgggtgaataaattgagattcggtttgttgggcgttatgtggagatcgtgtgtaggaagagttaagatattagagtcgggggggtttcggtgatttttgtcgttttttgtattttgggtttatggttggggtttgtttttttttagttggtagtgttattttttttgtgttttattaagtttattagtaa

SEQ ID NO: 10515 - DNA, 201 bp, synthetic construct
  misc_feature 1..201: note = Description of Artificial Sequence: Synthetic polynucleotide
  source 1..201: mol_type = other DNA
tgtcgtggtttcgggttattgtagtttttttgtttcgggttttcgtggtttttttgtttcggtttgttaagtgtttgggattgcgggcgggcgtcgttacgtttgattggtttttgtatttttggaggagacggggtttcgttttgttgatcgggttggtttttggtttttgatttcgagtggtttgttcgttttggtttt

SEQ ID NO: 10516 - DNA, 233 bp, synthetic construct
  misc_feature 1..233: note = Description of Artificial Sequence: Synthetic polynucleotide
  source 1..233: mol_type = other DNA
agtattcgatttgtgaaaattacgtttatgtagtaatataattggttcgaaagcgttaaagagttaattaagaggttttcggtttttcgtagtttatagcgtagttcgattttttagagtcgtcgagtagacgttcggtgaattttagaggcggcggagggtggcgaggagttttcgttttttttcgtttttttttttttcgatttcgttttttttttttttttttttttttt

SEQ ID NO: 10517 - DNA, 201 bp, synthetic construct
  misc_feature 1..201: note = Description of Artificial Sequence: Synthetic polynucleotide
  source 1..201: mol_type = other DNA
tcggagttgtagtagaagcgttttcgatttcgtttaggtttttagtttatttttttttgaaggtcggtagggggcgttattatcgttggttttttcgcgcggtttcggttttcgtttcgggaatcgagtgtttgtagttcgcgattttggggaggtatagggttagggtatcgtttcggcggagaaagtggttgtgtcgcg

SEQ ID NO: 10518 - DNA, 201 bp, synthetic construct
  misc_feature 1..201: note = Description of Artificial Sequence: Synthetic polynucleotide
  source 1..201: mol_type = other DNA
gggggacgggttagttagggtaggagtttaaggatatgaggtaaagattttaggttgggatttttcgtagttcggaggcggggggtggggagggagggtcgggggggtgttgggcggagacgttgggtattggggttagcgttgggtagttatgtacgggggcggggtaataggtaggttagttgttgttgttttttagga

SEQ ID NO: 10519 - DNA, 201 bp, synthetic construct
  misc_feature 1..201: note = Description of Artificial Sequence: Synthetic polynucleotide
  source 1..201: mol_type = other DNA
aagttcgtgtagcgcgcgtcgttttattaacgcgtttcggcgtaggcggtagaggaaagcggtttttacgcgcggcgttcgcggtttcggggttaggggcgcggttagtagtgttagtacgttttttattacgtcgtcgtcgtttttttcggcggtggtcgagatcggggcgaggttcgtagcgatcggttcggcggggtt

SEQ ID NO: 10520 - DNA, 201 bp, synthetic construct
  misc_feature 1..201: note = Description of Artificial Sequence: Synthetic polynucleotide
  source 1..201: mol_type = other DNA
taggaatgagtttgttgagggtttagtttcggggtcgggagtttgttgtaaaggatatgaaaaatttttattattatttttgtatgtgaaaagaatatgcgtgttggaaataattttttaatttatatatttttaaatatttgtttagatttataggagaaatatttttattgatttttgtataaagtgtattggaggaaa

SEQ ID NO: 10521 - DNA, 201 bp, synthetic construct
  misc_feature 1..201: note = Description of Artificial Sequence: Synthetic polynucleotide
  source 1..201: mol_type = other DNA
ggggcggggaggagggcggagggggtgtaaattaagtggtgggaaagagataaaggaagagtgaagagcgagacggtgcggatggggaagggggaggggcgcggaggggtagtcggtgggtagcgcgtcgaggagttcgagtttgaatttgattaagtattgggggttttgtcgtgggggtggggcgggggtacggtcgag

SEQ ID NO: 10522 - DNA, 201 bp, synthetic construct
  misc_feature 1..201: note = Description of Artificial Sequence: Synthetic polynucleotide
  source 1..201: mol_type = other DNA
agtttttaagggaggaggggagagttgtagagaggaggaggggtcggggaggtcggttttataaaggcggttggaataattttgttcgttagatttcgtcgttcggattttttgagttgttcgttattttacgtgatcgcgtcgttttttagttttatcgttgagtgagttggggcgcgtttttatttcgtttttagtttt

SEQ ID NO: 10523 - DNA, 201 bp, synthetic construct
  misc_feature 1..201: note = Description of Artificial Sequence: Synthetic polynucleotide
  source 1..201: mol_type = other DNA
gaggagtagtagcgttcgtcgggggatgtagtagcggtagcggcggcggcggcggcggtagcggtagcggcggcgcggagttttttgcgtttagcggttcggtcgggttgcggtagaggcggcggcggcgtttcgtttcgggtgaggttgtcggggtcgtgcgcgttggtgagtggggcgtggggggtaggtgggtggttg

SEQ ID NO: 10524 - DNA, 201 bp, synthetic construct
  misc_feature 1..201: note = Description of Artificial Sequence: Synthetic polynucleotide
  source 1..201: mol_type = other DNA
gttcggagaagtggatttcgttttatcgagaggttagggtttttatgttttcgttttcgatttcggtttagtggtttttgtttttcggattgttttcggcggggcggggttgtatttcggagttttagtttatttcgtagtttttttcgtatttgatattatcggttattttttataatatggcgttcggcgttttttaaa

SEQ ID NO: 10525 - DNA, 201 bp, synthetic construct
  misc_feature 1..201: note = Description of Artificial Sequence: Synthetic polynucleotide
  source 1..201: mol_type = other DNA
ggaatttggaggaatatggcgttgtcgttttttggcggaagcgttcgggtttgcgggtaggggtagttttttagggttcggaggcgtagtgaattttcgcgagttcgtagttcgagtttcgcgttttcggcgtttttgagttcgtttagcgttgtttgcgtttttttttttttttcgttcgtcgttttttttttttttttt

SEQ ID NO: 10526 - DNA, 201 bp, synthetic construct
  misc_feature 1..201: note = Description of Artificial Sequence: Synthetic polynucleotide
  source 1..201: mol_type = other DNA
gttagggatcgttttttattgttttttggttgtcgaggagcggttatcgggttcggttttagtttttttgttttgatttttttttttaagtttttatgtcgagttggagagcggtttttgagtacgtatgtggttcgaaaggtggtagttggtcgggtttgggttttttatgtgatttagttatgcgagggatcggttgaa

SEQ ID NO: 10527 - DNA, 410 bp, synthetic construct
  misc_feature 1..410: note = Description of Artificial Sequence: Synthetic polynucleotide
  source 1..410: mol_type = other DNA
agatatgttgggttagtagtgttggttttattttagattttttttagttttttttagttagtcgttaaggggtttttttaatcggaaatttttaattcgcgatttcggcgggtgtatcgtcgagtttttcgggaagtgtagttttagcgcgagcgggacgttgggaaatgtagttttgcgcgtttacgttttcgatcgggtcgtgttcgtcgcggttttgcgaggttcgaggggtaagggagcgtgtagcgggggcgggattacgaggcggcggggttgggggcggtttttgtgtttgcgtcggggatcgcggtgatttcgttgcggatcggttcgcggtgattttagcgcgaacgagttggttgtcggttggggcgagaaaggtttgcggatcggtttgggcgtatgcg

SEQ ID NO: 10528 - DNA, 201 bp, synthetic construct
  misc_feature 1..201: note = Description of Artificial Sequence: Synthetic polynucleotide
  source 1..201: mol_type = other DNA
gagttagagatgtatttttggtcggtttgagtatttgcgggaattttgtgagtttttgaggtttattttttgttttttattttttttttttgtaaatttcgagttcggggtaaagttgttttttttttttatatttttttttaattcgataattaacgttttttagttttcgggaatgggacggattttttttaaggattt

SEQ ID NO: 10529 - DNA, 201 bp, synthetic construct
  misc_feature 1..201: note = Description of Artificial Sequence: Synthetic polynucleotide
  source 1..201: mol_type = other DNA
gggatttttcgtttttcggtttagggggtatttatttcgtacgtggagttcgggtagcgtttttagacgtatttagcgggatatcggagaggacgtcgacgtagtgtaacgtttcggtcgaagcgtcgaataatatgcgcgcgtcgcggaggaggtgcggggcgtgttcgtttaggtagcgggtcgtttcgacgtggtaga

SEQ ID NO: 10530 - DNA, 201 bp, synthetic construct
  misc_feature 1..201: note = Description of Artificial Sequence: Synthetic polynucleotide
  source 1..201: mol_type = other DNA
atgtgttttgtcgagttgatttgtttagtttattttttattttgaaacgacgttaagtatgaagaagagttgtataaataatgttaataatttcggtgtcgtttttatgggggttatggtggttttagtgtattttatatgttttttttttttttgtttttttttttcgtgtatatatatattgttttttgatttaagagt

SEQ ID NO: 10531 - DNA, 201 bp, synthetic construct
  misc_feature 1..201: note = Description of Artificial Sequence: Synthetic polynucleotide
  source 1..201: mol_type = other DNA
gtgattttgcgaggttatatttcgggtgcgtcgttgcgggttcgtgggttcgtgggttgtagtttttcgtttttgtcgggtggacgagtttcgggttcgcgtggagttgttcggttaaggtcggttcgggaggggcgcggcgtagggcgggtaggggcggggttttaggttaacgtttagttttagatttagtttcgtcgt

SEQ ID NO: 10532 - DNA, 201 bp, synthetic construct
  misc_feature 1..201: note = Description of Artificial Sequence: Synthetic polynucleotide
  source 1..201: mol_type = other DNA
ggagggagaaagggagagagttttagtcgtttcggttgtggtaggaggagttttaagagcgtttttcgagttcgtttcgtatttttaggtttagttcggcgtaggttttttttttcgttttttttattttcgttagttgttgaaatttttttatcgttttttcgcgggtaatagtgttcgttaggcgtcgtcgcgcggtgt

SEQ ID NO: 10533 - DNA, 201 bp, synthetic construct
  misc_feature 1..201: note = Description of Artificial Sequence: Synthetic polynucleotide
  source 1..201: mol_type = other DNA
gtttttaatgcgggcggttttcgtattttacgcggttcggggtttttgtttatttttcgcgggcgggtttcggatttttggggttttttagttttttttcgtttttttttcgcgtcggtttcgtgttttgcggttcggcggtttcggcggcgcgagtcgggggaggcggcgaggggtgttttcgaggttcggcggcgcggt

SEQ ID NO: 10534 - DNA, 201 bp, synthetic construct
  misc_feature 1..201: note = Description of Artificial Sequence: Synthetic polynucleotide
  source 1..201: mol_type = other DNA
ttcgtattttttttgatttttatggatatttagttaatagtaggaataaaaattaagatttttttttttttattcgtttggatatttattttttcggttcgcgtcgtcgtgttttttattcggttatatagcgattttaaaagtttagtttttatttcgcggagatttcgatagttttgggaggttttttttaaaagggaa

SEQ ID NO: 10535 - DNA, 201 bp, synthetic construct
  misc_feature 1..201: note = Description of Artificial Sequence: Synthetic polynucleotide
  source 1..201: mol_type = other DNA
agtcgttcggttgacgtgataagggaggtgtaggttaatacggcgatttcgcgttttttggcggtagtgtcggagtagcggcgttgtttttgatttattcggtattcggttttcgggatcgtttggcggttgtgaatgtagagttggggcgacgtggggttcgttttttgggattgggtgtgagtttgcgtagtgagttat

SEQ ID NO: 10536 - DNA, 201 bp, synthetic construct
  misc_feature 1..201: note = Description of Artificial Sequence: Synthetic polynucleotide
  source 1..201: mol_type = other DNA
aattgaacgtttgaaacgaaggtggcgcggtttggataaatttgatttttcgatatttttcgtttttgcgttcgttttcgttaagcggggaggagcgatcgttataatggattttttcgtaggttttgtgcgcgttgggaatttagttgtcgtcgtttcgtagagttttttgttttcggagggcgtttattttcgggtcgt

SEQ ID NO: 10537 - DNA, 201 bp, synthetic construct
  misc_feature 1..201: note = Description of Artificial Sequence: Synthetic polynucleotide
  source 1..201: mol_type = other DNA
gtttcgggcgtttgttgtttcgtgtttttatcgacgattttatttagttgcgttacgcgtcgtttcggttgtcggtcgcgcgttttgttcgtcggttttcgttcgtaatcggcggtttagggcggattcgggtttttgcgttttcgcgagaagcgcggcgttgcggggtcgtgggcgtttgagttcgcgcggttttcgagg

SEQ ID NO: 10538 - DNA, 294 bp, synthetic construct
  misc_feature 1..294: note = Description of Artificial Sequence: Synthetic polynucleotide
  source 1..294: mol_type = other DNA
ttcgtcgtttatgtttttattgtaaggtcgtagttttcgtcgtcgatttcgatttttcgtttcgtttagtcgcggtttcgttcggcgtttttttttcggtggaagtttaagtttaattaattgagttcgaggcgggagggaagggttttgcgcgtcgtggttcgtttcgtttttttttcgcgttttttttttcgttttgggtggtatttttttcgtcggtatttataataagtcgttgattaatgaggtcggggtcgttttatttcgttcggtcgggtcggggttttcgcggga

SEQ ID NO: 10539 - DNA, 201 bp, synthetic construct
  misc_feature 1..201: note = Description of Artificial Sequence: Synthetic polynucleotide
  source 1..201: mol_type = other DNA
taagtttatagaagagtaaatttttatttttcgaggttgttgtggaagttatcggggttgggatagtagagaggaatttagacgggaatatcgttttttcgttagattttcggcggtttttttttttttttttaaatttatttttaaagttaagtgtaggttttttcgttttagttagaagcgttgcgtgagtttttatac

SEQ ID NO: 10540 - DNA, 201 bp, synthetic construct
  misc_feature 1..201: note = Description of Artificial Sequence: Synthetic polynucleotide
  source 1..201: mol_type = other DNA
gaggtttacgttttttagatcgttatagtcgttgttatagggtttgagtttgggcggcgtttcgtttcggtcgtacggtgcgtcggcgttaatttttttcgaaggtttcggtagttaagattgtaggtttttattaagtattgttttcgaattgggttacgagagcgtgtttttgattggtttgttttggaggttgggaag

SEQ ID NO: 10541 - DNA, 201 bp, synthetic construct
  misc_feature 1..201: note = Description of Artificial Sequence: Synthetic polynucleotide
  source 1..201: mol_type = other DNA
tttttcgcgcgtcgttttttttcgtcgtcggtcgcgtgcgttttcgttttttttttcgcggcgggagtattttcgttcgttatttggggattcgcgtcgcgtttttcgttttcgttcgttcggcgtttatttttcgcgttttttgttcgttggggttataattgttttttatttttcggaggggttattttgggggtggtt

SEQ ID NO: 10542 - DNA, 201 bp, synthetic construct
  misc_feature 1..201: note = Description of Artificial Sequence: Synthetic polynucleotide
  source 1..201: mol_type = other DNA
gcggtttcggtgagcggggcgaggggcgggtgggtagcggcgtcgggggaggtcgaggaggcgaatggtggtgtcggggcggcgggtatcgggcgaggtcgcggttagttttttcgggtcggagttgggtatcgcggggacggggagtgtcgggggtaggtgaggttagggtaggagtttacgcggtgggtgcgaaggttt

SEQ ID NO: 10543 - DNA, 201 bp, synthetic construct
  misc_feature 1..201: note = Description of Artificial Sequence: Synthetic polynucleotide
  source 1..201: mol_type = other DNA
ggaggcgttgcgttaggcggaggaggagcgtaaggttaagtacgttaagatggaggcggagcgcgaggtcgtgcgttagggtattcgagataaggtgcgcgtcgggtcggtttcgtttgcgggaaggcggttttgagtttagcggggatttagatttcgtttgggtggaaggggttgttcggaagaggggcgggcgttttt

SEQ ID NO: 10544 - DNA, 201 bp, synthetic construct
  misc_feature 1..201: note = Description of Artificial Sequence: Synthetic polynucleotide
  source 1..201: mol_type = other DNA
aaagagaaaagaaatagataaaattagggtagggggtaaaaaagtttttcgcgtttttcggaatttagcggtcgcggtcgcggttatcgtcgtcgtcgtcgggggtgggtttcggaagagtttgtttagtagggaaggggaggacgggttaggagcgaaattttgtaggcgaggaagggatagacgcgtaaagaaaaagtg

SEQ ID NO: 10545 - DNA, 201 bp, synthetic construct
  misc_feature 1..201: note = Description of Artificial Sequence: Synthetic polynucleotide
  source 1..201: mol_type = other DNA
cgcgggcgtagcggcggtcgggtacgaggtcgggttgatattattatttgttggggcgcgggaagaacggtagttgttttgcgttgtttcggcgagggacgtttggaaaaggttgaagttttgggcgtttttaagttcgttatttacggggttttcgttattttagtttgttcgtcgtcggtcgttttttgtgattttttg

SEQ ID NO: 10546 - DNA, 201 bp, synthetic construct
  misc_feature 1..201: note = Description of Artificial Sequence: Synthetic polynucleotide
  source 1..201: mol_type = other DNA
ttttttagggatggttttgtgtttgggttttttttttttttaaatttcggggtggtttttgttttattagattgaatcggttttaaggagaaaagttgacgattattttgttttagttttcgggaagttttgttttataaagaataagagtttttggttttgtgaaatgagttataggttgttttgattatgtttatttgg

SEQ ID NO: 10547 - DNA, 201 bp, synthetic construct
  misc_feature 1..201: note = Description of Artificial Sequence: Synthetic polynucleotide
  source 1..201: mol_type = other DNA
ttttaaatttcgatcgtcggtttggcgcgcggttgcgtttatcggtttcgcgttgttgtcgtcgttatcgttatttcgtcgtcgtttcggttcgcgggtcgtttaggttagtattcgggtcggtttgttttcgtcggtcgttcgggtgttcgtcgtcgcgtcgcgtttcggtcgggcgtggatggagggcgtcgcgcgttt

SEQ ID NO: 10548 - DNA, 201 bp, synthetic construct
  misc_feature 1..201: note = Description of Artificial Sequence: Synthetic polynucleotide
  source 1..201: mol_type = other DNA
cggtcggatttttttttagattgtttgcggtttgaaggggttaggttcgcgtaaggttttaggttgtttgggcgtcgggtcgtattgttaggagttgttcgggagtggttttttaggaatattaggtattgattatatattaggggttgggaaattaggtggtttgtattaaggcggtttcggggatttgtttgtggtaag

SEQ ID NO: 10549 - DNA, 463 bp, synthetic construct
  misc_feature 1..463: note = Description of Artificial Sequence: Synthetic polynucleotide
  source 1..463: mol_type = other DNA
agcgggcgtttcgtagtcgtgttagcgttacgttgtagtagtcgagtattagttcgaaaggaagtacgaaagcggttagagtttttaggtttaggtgggcggcggcgtggatcggcgacgggtggtatagttggtatacgcggtttttttataggtggcggtagacggcggtcgggacggcgagtaatagggcggttagttagatcgttagtagtaggcggcgggttagggtcgggttgcgtagtcgaggcgttaggaaggggcgggtgattgcgaggtagcgttgtaggttgagtaggtcggtgagtagtacgttggcgtatatgttgagcgcgtatacgtagtatatcgttttgtagttcgtttggtttagcggttaggtttgtcgggttaggaaggttataaagagcggcgtgagtagtagtatcgcgtcgtcggttagcgttaggtgtagtataagcgt

SEQ ID NO: 10550 - DNA, 201 bp, synthetic construct
  misc_feature 1..201: note = Description of Artificial Sequence: Synthetic polynucleotide
  source 1..201: mol_type = other DNA
ggggacgttagtggattggagtcgcggagtttcgagggaaaaattttgtaggcgtcgcggtcgggattcggttacggttttagtttattttagtaggtgcgggaggaagaggtagcgtcggagtttcgaggttagagagtttcggcggcggcggtcgtttttttttttcgagttggtttgaagtcgttgggtattttcggt

SEQ ID NO: 10551 - DNA, 201 bp, synthetic construct
  misc_feature 1..201: note = Description of Artificial Sequence: Synthetic polynucleotide
  source 1..201: mol_type = other DNA
agggttgggaggatttgtagtttttttgttggttttttttttttaggaagtcggttagtttggagtcggttgtttatttcgatttatttttcgtttgggcggagtaggaatgtggaagttggttcgaaaggattgtgtttttttttcgttaaatatttttttttcgcgttttttattaagttttggtcggggttgtggagc

SEQ ID NO: 10552 - DNA, 201 bp, synthetic construct
  misc_feature 1..201: note = Description of Artificial Sequence: Synthetic polynucleotide
  source 1..201: mol_type = other DNA
agggcggagttttcggggtagaggcgtttcgcggtaagatcgtcgaagtgggtttcgacggttgggtcgttgttttcggggggtcgaagggtgcgggttcgggtttcgggggtcggggttttttttttagtattacgaatttgacgtcgtcgagtttttttattatcgttacgttgttgacgaattgtttgaagcggtttt

SEQ ID NO: 10553 - DNA, 201 bp, synthetic construct
  misc_feature 1..201: note = Description of Artificial Sequence: Synthetic polynucleotide
  source 1..201: mol_type = other DNA
cggaggaggttgcggggggtttcggtttaggcgaaggaagggtaagaggttgttcgatcgggggcggcgtcgggaggtgggtgggtttaatatttaggtcgggggaggggtttaagagatatcgggaagggtagtcgagttttaggggcgggtggggtggtagttgtgtgtagtaggggatagggttgggtttttggaagt

SEQ ID NO: 10554 - DNA, 201 bp, synthetic construct
  misc_feature 1..201: note = Description of Artificial Sequence: Synthetic polynucleotide
  source 1..201: mol_type = other DNA
tagtcgatatgacgcgcggcgtagttaatgggaggcggagttggcgttttttggtcgggggggggtcggaggggtgggtttcgcgttttcggtgtttgtcgtgtttattgaatggagagagcgagcgtcggttagtttattcggtcgtttcgtgttttagtcgtagtcgtcgcgttttttagtttagttttaagtcggatt

SEQ ID NO: 10555 - DNA, 201 bp, synthetic construct
  misc_feature 1..201: note = Description of Artificial Sequence: Synthetic polynucleotide
  source 1..201: mol_type = other DNA
ttttttttaagtttttttttggggattgatattttattagtatagagattaataatgttagataagagatttttgattttatatttggggttttcggaacgatgtttgggagagaaaatatgacgttttttgtagaggcgaattttagttcgggaggagggaggtcgttgggatgtgtcgtcggcggtttttgggttcggt

SEQ ID NO: 10556 - DNA, 201 bp, synthetic construct
  misc_feature 1..201: note = Description of Artificial Sequence: Synthetic polynucleotide
  source 1..201: mol_type = other DNA
agattggattcgaattcggtttattttattcgagcggcgacgttagcgttgattttaggcgtgtttcggttttcggcgcggtttcggtttaatcgtgtacgttcgcggaaggtttcgtattcgcgttagaagtggtttgttcggggttatcggttcgtaagttttcggtgttttcgaggtttttgtttcgtttcgcgcggt

SEQ ID NO: 10557 - DNA, 201 bp, synthetic construct
  misc_feature 1..201: note = Description of Artificial Sequence: Synthetic polynucleotide
  source 1..201: mol_type = other DNA
ggggttggggagggttgtcggcggcgcggcggggtcggcgggaggcgggaggttgcgcgcggcgcgggagcgtgcgtcggggttagtaggggcggggttcgcgcggtcgtcgggattggaggcgcgggggtagcgggtagggtattttgagggtatattttcggttatttggcgggagatttagttttgtcgcgcgtcgtt

SEQ ID NO: 10558 - DNA, 201 bp, synthetic construct
  misc_feature 1..201: note = Description of Artificial Sequence: Synthetic polynucleotide
  source 1..201: mol_type = other DNA
gtttcggtcgtcgggcgcgtagtcgtttttttcgcgttttgttcgtttttatggtattttttaggaacgggaagggggtgggagtcgagtcggcggtcgcgtcgcgtcgaatgtgtgttttttttttcggttgtttacggcggtcgaggcgtattgtattttgttggcgtcgaagggtgttttggaatagtagagggagga

SEQ ID NO: 10559 - DNA, 201 bp, synthetic construct
  misc_feature 1..201: note = Description of Artificial Sequence: Synthetic polynucleotide
  source 1..201: mol_type = other DNA
tttagtgttgttcgggcgttttttcgtagtagttttagggcgaggaggatggggggggttttcgtaggggttatattgtcggagttttacggattcgggcgggacggtgaggtttttatattgagtcggtggtaaagttttcgcgaggatgaaggaggaatttcgtgttttttattttattaggtttcgtattttttggtt

SEQ ID NO: 10560 - DNA, 258 bp, synthetic construct
  misc_feature 1..258: note = Description of Artificial Sequence: Synthetic polynucleotide
  source 1..258: mol_type = other DNA
ttttttgggataagaagtggagtggggcggttaggacgcgggtcgtggggatcgcgagggaggagggggcggtcgttcggatttatttcgtggggttttcgcgcgcgggcgtttcggcgtgtcggattatgtcgtcggtagtttcgggacggggaacggaggcgtttaggcgtcgggtcgcgcggaacgcggagtttcgggcgttcgtatgtttttggttttggttttttggaagggttaggtcgtcgttgtcgtcgc

SEQ ID NO: 10561 - DNA, 201 bp, synthetic construct
  misc_feature 1..201: note = Description of Artificial Sequence: Synthetic polynucleotide
  source 1..201: mol_type = other DNA
ttcggtcgttacgtttttttcgagggtcgtttcgttttcgtcgggtttcgcgagcgcgcggtgggggaggggagggtttcggagcgcgtttgcgtggggcgggggcggtagtcgattaggggttgggtttggtcgtttagggtcgggttttggttcgtcgtttacggtgcggagggttggtgggttttttttggtcgtcgg

SEQ ID NO: 10562 - DNA, 201 bp, synthetic construct
  misc_feature 1..201: note = Description of Artificial Sequence: Synthetic polynucleotide
  source 1..201: mol_type = other DNA
tagtagttttttagagttttggtttggtagggaggggacggcgttcgagtagttatattgtagtttttcgggtttttttttcggtcggcgtaggtttcgcgtttacgattttttttgggagtcggatttgttttttttatcgtcgttattcgtcggtttttgcgttttttggttttcgatatttcgtttggtcgttttttt

SEQ ID NO: 10563 - DNA, 201 bp, synthetic construct
  misc_feature 1..201: note = Description of Artificial Sequence: Synthetic polynucleotide
  source 1..201: mol_type = other DNA
ttttcgcgttatttcgggttcgttttcgttcggttttttcggagcggtcgcgtttttagtcggggagtttaggggttttggttcgcggagtcgggcgcgcggggggcggttggggtcgtagtagggggaggttcggcgttcgtagtcgtcggcgcggggtttatcgggcgtgtgggtttatttcggtcggggcgcgacggg

SEQ ID NO: 10564 - DNA, 201 bp, synthetic construct
  misc_feature 1..201: note = Description of Artificial Sequence: Synthetic polynucleotide
  source 1..201: mol_type = other DNA
gggtttttagtacgcgttttagcgtcggagtagggttagggtttttttgcgattcggtttcgttttagatttttttagttttcggtcgcggattcgggtcgcgtgtgagcgttttttgtattttttatttttagggttcgtcgagagttacgattttttatagaaaatgagcgataaagagattttgtattgttttgattg

SEQ ID NO: 10565 - DNA, 201 bp, synthetic construct
  misc_feature 1..201: note = Description of Artificial Sequence: Synthetic polynucleotide
  source 1..201: mol_type = other DNA
tcgggtttagggcgtcgtttgtagttgcgcgcggtcgtttttagatggaatttttttattaacgtaaggttcggtcggagtagttattcgggagttgggcggcgaggggttatttttttttatttcggcgggtgtaggatcggggggtttgggtagtaattagtggggaggagcgttggattgtgtacgtcgagttcggta

SEQ ID NO: 10566 - DNA, 201 bp, synthetic construct
  misc_feature 1..201: note = Description of Artificial Sequence: Synthetic polynucleotide
  source 1..201: mol_type = other DNA
ttcgttttattttttgtttgttttcggttgttagagatttaggtgtagagagattttagaggtggcgttcggggttttggcgttttttttgcggacgttcgttgtagagtaggaagtcgtcgtttcggggcggaggggcgagtcgggttagggggtcggggtggagaggtttgtagggtttgcgcgttttttttattcgcg

SEQ ID NO: 10567 - DNA, 201 bp, synthetic construct
  misc_feature 1..201: note = Description of Artificial Sequence: Synthetic polynucleotide
  source 1..201: mol_type = other DNA
agtattaggttcggtttttcgtatatcgtttcgaatttcgggggtacgggcgcgggtttttcgggtttttcgggggacgcggggtttttaagttaaacgcgcggttcgggggacggcgtcgcgggttttttcgggtacgcgcgttttttaggggacgcgagttttttcggggacgcggcgttcgcgttgtcggttttttat

SEQ ID NO: 10568 - DNA, 201 bp, synthetic construct
  misc_feature 1..201: note = Description of Artificial Sequence: Synthetic polynucleotide
  source 1..201: mol_type = other DNA
ttttcggtcgaggaggggtcgcgtggcgtcgcggggggcgggtcgcgtacgtttttcgtagggaggatttagggatagttagggtttcgggagagttcgcgcgtatcgttcggtttcgcggcgttagttatggcgttcgtgcgtggtttcgttagggatggggcgacgcggttagagtcgtacgcgatcgaaattcgtatt

SEQ ID NO: 10569 - DNA, 201 bp, synthetic construct
  misc_feature 1..201: note = Description of Artificial Sequence: Synthetic polynucleotide
  source 1..201: mol_type = other DNA
gttagaaaggatcgagaaaaattttaaagttttaagtttgagttagggagggttttagagggaggtttgattgtagatcgggagtttttttttttcgtgcgtcgttgttcgggacgagaaattcgtggggtatttaggattaggatacgaggttttagtttgggtaggtggataagttgtggggttttatttttcgtaggc

SEQ ID NO: 10570 - DNA, 201 bp, synthetic construct
  misc_feature 1..201: note = Description of Artificial Sequence: Synthetic polynucleotide
  source 1..201: mol_type = other DNA
gtcgttgagtacgcgttttaggtaggttttgggaagttcgggatggaagtagttttttttttttcgtttttttttttttttttttttttttttttttttcgcgtttttttttttttttttgttttttttggacgtgggttgtcggttgtagttcggagggacggggcgcgggacggagtttttcgcgggaggaggggtcgg

SEQ ID NO: 10571 - DNA, 203 bp, synthetic construct
  misc_feature 1..203: note = Description of Artificial Sequence: Synthetic polynucleotide
  source 1..203: mol_type = other DNA
gtaggagcggttcgtgttcgcgggcgggagcgtgcggtttggattgtttcgtcggataggtattgttttttcgttttttcgggttcgaggcgggtcgcgcgcgtcggtcgtcgttcgggcgtttcgcggtgggcgagatgcgtcgcgttcgttttatgtttgtcgttcgcgcgttttttgttttttatttcgtagtcgttcgt

SEQ ID NO: 10572 - DNA, 201 bp, synthetic construct
  misc_feature 1..201: note = Description of Artificial Sequence: Synthetic polynucleotide
  source 1..201: mol_type = other DNA
tttttcgtagagggtaggatatttattttttcgtgtatttgtttttttttcggtttttcgtttttagtagtattttaggatttaggggtgttatcgggtcggggagggaggggttgagtttgggtttggggatatcgggatagggggaggggttggcgttttcgtttggtcgggatttcgtggtttagcgcggttttacga

SEQ ID NO: 10573 - DNA, 201 bp, synthetic construct
  misc_feature 1..201: note = Description of Artificial Sequence: Synthetic polynucleotide
  source 1..201: mol_type = other DNA
agcgtttgtttaatttgtagtgatatcgtttagttgtttagggttttagttgttatagttaattagttcgcggtcggggaggagcgtcgggtaggggggcgggggggtatgaaggggtcggcgggggaggttgtgggggttgtaggaggggtaggcgtaggaggaggtttgtggtttttaggttcggttcgtttttttagg

SEQ ID NO: 10574 - DNA, 201 bp, synthetic construct
  misc_feature 1..201: note = Description of Artificial Sequence: Synthetic polynucleotide
  source 1..201: mol_type = other DNA
gggcgtattgggcgaaggcgacgcgcggttcgtgggtgtagcgttgggcgttttgaggaggtttttgttgcggtttcgggcgtttgtgcggtttttgagcgcggagttgggatcgcgttttttttcgttattggacgacgtgagtaaacgtttcgttttcgggtttcgtttttgtcgttgttatcgttttcgtttttttag

SEQ ID NO: 10575 - DNA, 201 bp, synthetic construct
  misc_feature 1..201: note = Description of Artificial Sequence: Synthetic polynucleotide
  source 1..201: mol_type = other DNA
taggtagaggggggcgggagggggtgtgagggagaggaggagtcggagtcgtcgttgcggtttttttcggggaggggagaggagaatttttttttttttcgtttttttttagtttttcgttggttcgggagggggtggggcgtcgaggtcgcggcgattcggtagggtttggtcggtgaagagtaggcgggcggggtgcgg

SEQ ID NO: 10576 - DNA, 201 bp, synthetic construct
  misc_feature 1..201: note = Description of Artificial Sequence: Synthetic polynucleotide
  source 1..201: mol_type = other DNA
ttaattttgcgttttttttttagttcgagttttttcgttgtttttttttttttttttttcgagtttttttttttttggcgcggcgtcgttagttagtttcggcggggagagtgtaggtattttgtttttagaataattagtaggatttaagtcggtttttcgagcgcgttttttttttttttttttgtttttttttttcgg

SEQ ID NO: 10577 - DNA, 201 bp, synthetic construct
  misc_feature 1..201: note = Description of Artificial Sequence: Synthetic polynucleotide
  source 1..201: mol_type = other DNA
cgcggacggcgttcgatagtagttggaggagcggtttgtcgatttggcggcgagttatttggaggttattcgtgcgcgggacgagtgggatcggtagaacgcgcggttgcgttaggagaacgttcggttgcggttcgagaatcggcggttgaagcgcgagaatcgtagtttttttcgttaggttttgcggtttttcggcga

SEQ ID NO: 10578 - DNA, 201 bp, synthetic construct
  misc_feature 1..201: note = Description of Artificial Sequence: Synthetic polynucleotide
  source 1..201: mol_type = other DNA
ttcgttttttcgttttagttcgcgtatttatcgcgtacgtagagtagtgatatggtcgaggatcgggtaagtttttgtcgcgttttagtcgcgtcggatcgttttttttttttttttagtaggtgtcgcgattgttttcgttatcggttttacgggtttggtagttttttatggtttcggtcgtaggtagcgtttcgtcgt

SEQ ID NO: 10579 - DNA, 201 bp, synthetic construct
  misc_feature 1..201: note = Description of Artificial Sequence: Synthetic polynucleotide
  source 1..201: mol_type = other DNA
tggttattgttgcgtaggcgtagttttgggagcggcgggagttggaagtttaggagttttagggggcgtagggtcgggtagaaggcggcgagttgggggcggatatttatcggggattggaagcggttcgcgtaggttggggatattcggggttagggcgggtcgtttggggtgggagagtatagtgaggaagtttgacgt

SEQ ID NO: 10580 - DNA, 201 bp, synthetic construct
  misc_feature 1..201: note = Description of Artificial Sequence: Synthetic polynucleotide
  source 1..201: mol_type = other DNA
ttggggacgtcgtagttcggttcggggagggggcgttaggtcgggagtcgtagcgcgggagggacgagttcgggtcggcggggggaggggagcgggaagcgtttttgttgttggcgatcgggattttttttcggtataggggaaaggcggggaagttattttttatcgggtttgtgtttttgagaggattttttgatggtt

SEQ ID NO: 10581 - DNA, 201 bp, synthetic construct
  misc_feature 1..201: note = Description of Artificial Sequence: Synthetic polynucleotide
  source 1..201: mol_type = other DNA
ggtttttgggaggcgtcgcgtgggggcgcggttcgtggagttcgggcgttagggatcggtcggggtcggcgtacgggtgcgttttgggttcgttcgggtcgtgggagttagggagttagggagttagggatttcggttttcgtacggggtagataggggtagcgcgggcgattcggagcgtttgcgttttcgcggtttttt

SEQ ID NO: 10582 - DNA, 523 bp, synthetic construct
  misc_feature 1..523: note = Description of Artificial Sequence: Synthetic polynucleotide
  source 1..523: mol_type = other DNA
agagtatcgggttttttattgttttagagcgcgtgtgcggttttgggcgcgtatagtgacggtgacggtatttttggttcggtagcgtcgaggtcgtttcgttagatagttagcggtcggcggtaggtcgggttatgagcggtaggggtcgggtcgggtttcgttgattttggtttcgcgcggtagtttttttagttttcgtttcggtttttcggtatgagagttcgttcgggttcggggttgcggttgttttagattcgtcgtacgttggcgcgtttcgggttcgcggagtcgcggtgttgatatttgcgtcgtattgcgtcgttcgttcgttcgttgtgtgtttcgggggcgcggttatggaggtggtgggtgatttcgagtatagtaagagggatttcgtgggatacggggttttcgtcgtggtttttcgggggcggtatcgttaggtgagcgtcggtcggggcgaggtcgggtttcgggcggtaggtacggggttaggtggttttgaaatttggcgtag

SEQ ID NO: 10583 - DNA, 201 bp, synthetic construct
  misc_feature 1..201: note = Description of Artificial Sequence: Synthetic polynucleotide
  source 1..201: mol_type = other DNA
cggcggtaggcgggggagggggtgggggtgtaggggcggtttcgcgggtcgcggggggggcgcgcggcgtagcggggtttcgggcggggcgtagcgggtcgcggggtttcgggcgcgtttttcgcgttattttagtgttatggtgcgttcgttgagtcgtcgggtttagagttggggttggcggcggagggatacgggtcg

SEQ ID NO: 10584 - DNA, 201 bp, synthetic construct
  misc_feature 1..201: note = Description of Artificial Sequence: Synthetic polynucleotide
  source 1..201: mol_type = other DNA
cgttttttcgttttttcggtatttgtttattttcgtaattgtttcggtttttaatatttgtatcgtttaatttttttttttttcgttttttgtttttttcgtatttgttcggagttttagtatttgtttcgtttttcgttatttttttttttgttggtttgatggggtgtgggtttaagggagttatatttgggcggaggt

SEQ ID NO: 10585 - DNA, 201 bp, synthetic construct
  misc_feature 1..201: note = Description of Artificial Sequence: Synthetic polynucleotide
  source 1..201: mol_type = other DNA
tttcggtttgacggaatataggcgacgtacgtgaagtttaggttttattttagcgtaggcgggtttttagcgatttatagttgttatatattcggttagcgtcgattttcgaaggcgtattttttatattttatttcgagtatcggttttatcgttagggaaggtttttttggatagtaaggtcggggtttaggatttgcg

SEQ ID NO: 10586 - DNA, 201 bp, synthetic construct
  misc_feature 1..201: note = Description of Artificial Sequence: Synthetic polynucleotide
  source 1..201: mol_type = other DNA
cggtaattttttttatcgttttttgtagtaggcgtcgagtcgtcgttattttgtttttcgttttttttttttttttatcgatatttatatagcgaaaatcggttcggtcggtttgcggtttttattttacgtttgtagttttcgttttttcgttaggttttatttcggcgcggtgttttaggtcggtcgcggagtcgattc

SEQ ID NO: 10587 - DNA, 201 bp, synthetic construct
  misc_feature 1..201: note = Description of Artificial Sequence: Synthetic polynucleotide
  source 1..201: mol_type = other DNA
cgtcggcgggcgggaggtatatacgcgcgtataagcggaaagaaagcgggtttattgcgtggggatgttcgttcgcgtagttgtttcggcggcggcggtcgttgtttgtatcgaggtcgaggcgcggcggtggcggcggcggttgcggattgagtttttttcgtcgggcggtggatgtagggcgcgggaggggcgcgaggg

SEQ ID NO: 10588 - DNA, 201 bp, synthetic construct
  misc_feature 1..201: note = Description of Artificial Sequence: Synthetic polynucleotide
  source 1..201: mol_type = other DNA
tttttcgttagcgtttttcgttcgttcgttttttttcggtttcgtttcgcggggttgttggagaaattaagtttggggttttttttgtcgagtacggggcgagttttagaaggttttgtcgtgatggaaaatttttaggtaaattttttcgggttcgtggtttttaggtcgggaagttttcgttacgtgaagggttttcgt

SEQ ID NO: 10589 - DNA, 201 bp, synthetic construct
  misc_feature 1..201: note = Description of Artificial Sequence: Synthetic polynucleotide
  source 1..201: mol_type = other DNA
tttttatatagaaaatttgtattagttatgtaagttaaaaagttgtgtgaatttaggtgtttcggaaaggggttgtaggatatagtaaaatgttagtagcgtgtcggattttttttttttatttttttttttaaagaatagaggttaggaaaaatattggttgggacgttagaagggttatgtgttaattataattatatt

SEQ ID NO: 10590 - DNA, 301 bp, synthetic construct
  misc_feature 1..301: note = Description of Artificial Sequence: Synthetic polynucleotide
  source 1..301: mol_type = other DNA
gcggatggggttttgattagttgtggatttttgttttagcgtatttatttaatcgtgttttttttggttggtagagggcgttaaaggcgacgtgtcggtcgttagttttaggtcgagtttcgagcgtttgtaggaatacgtttttttattcggcgcgggacgtagagttgcgagagaattttgtttagcgcggatttaacgttagggcgtcgtttagaggttggtttttgtttcggttttattcgtcgggagattatagagttgtttttttagtcgttcgtcgttagaaattggaaaaaaa

SEQ ID NO: 10591 - DNA, 223 bp, synthetic construct
  misc_feature 1..223: note = Description of Artificial Sequence: Synthetic polynucleotide
  source 1..223: mol_type = other DNA
ttagagttgtacgtagatgaatacgaagagtagcgcgtagaatacggtgtagacgacggtgaggttaagttttacgtaggggggtacggtcggggttagcgtgggcggtagcgagtcgttgcgggttgggttttacggcggggtttttatcgggtcgggggcgttgtcgcgcggtcggggacgttcgggttttatcggggtttacggtcgtcgtcgttttcgc

SEQ ID NO: 10592 - DNA, 720 bp, synthetic construct
  misc_feature 1..720: note = Description of Artificial Sequence: Synthetic polynucleotide
  source 1..720: mol_type = other DNA
tagttgaatgaatgggggaggaaggcgggcgtcggttttttttcgcgcgttgcgttttcgtttcgttttcgtttttcgggcggattaggttttcgtattcgtatcggtttttttgtttcgtattggttgtttcgttcgtttgttaaggttaggtttggggggttggggttcgagtggtcgttgggggatagttttgggtatacgatcggagcgtttttttttttttcgtttggttcgcgtttaggggacggcgagagacgcggttttagttttttttttcgggcgtttcgttgcggttagatgtgggcggatgtggaggtcgggttatggcgaggagggcgggcgtttagaggggaagagattttttttttttttcgggcgtagggtttttttgtaggaggttgtatttgggtagttaaataaagttttttgttatcgtcgtcgcgcgttttgcgtttgtaagggttaaacggtagcgtacgcggttggtaggtaggatttcggtttgtgggtttaagagtcgaggggcgtagggcgaatatgcgagttttatggtattagcgagaggttattaatttttatttatcgagggtatttttgtagttaatatttttattacgattatcgtttcgggggttatcgttgtatttttttgggtgagttttggagaaggtattgttcgggagaaggggtatagggcggggatggaatacggttgtt

SEQ ID NO: 10593 - DNA, 1683 bp, synthetic construct
  misc_feature 1..1683: note = Description of Artificial Sequence: Synthetic polynucleotide
  source 1..1683: mol_type = other DNA
atcgagggagggtgtaaaaggcggggggcggagggggggtagattagattaggcgaaatttaataagtttttagttttttagtttaaagtttttattatcgtcgttattaacgagttattttaattgagttagtatcgtcgtttattcgtcggttcgtcggaatcgcgtttattttttgtaatttcgttcggatcggtatttcgttttttcggttcggttttttttttttcgtcgggtgtaaagttaaagatttagtaaggcgacgtgaatttttgtatgtagggtatatacgtcgttttcggtttcgggagtgcgggggttcgcggcgcggagggaggttgggcgttcgggttttcgggttaaggtcgtcgcgcgtgtttatttatgtttcggcggtttcggtttcgttggtttcggcgttcgtttagatttcggttttcgtcgttcgttcgagtttttaaaggtgttgttgcggtaattttatggcgatgagtatttgttaaacggcgagtcgcgagttggtcgttttagttcggggggcgtcggggttttcgggcgcgcggaggcggcggcgagcggcgggcgtttcggtcggtttcgcgtttttcgttcgattttgtcgttttcgtcgcgttatcgatttatggagagagatattaagggggaaaatggcgttttcggagttcgaggagttttggagtaattatatttatatatatacgttcgtacgtatatatattcgtatatattggtatataggcgcgcggcgagttttgttaattttagtaggagttaaaaaaaattttatatatatatatatatatatatatatatatatattttcgttttttcgattaatgttttttttttttttgtttttttttttttttttttttttttttttgtttttttttaaaggatgggttggagcgttaaaaaatgttggtgggtttgggttcgtaggaggcggcgcgcggagggcgagggcgtttttgttgagttgtgtagttcggttcgttgagttcggcggttttgttcgttcgttcgttcgttcgcggtcgttagtgttgtcgtcgtcgtcgtcgtcgtcgtcgttgttgttttatggtcgcgttcgtttcgcgttttcgtcgcgtttcgtcgtcgttcgttcgcgttttcggtgagcgttggagtggggtcgggttcgtgtgtttgtttttcgcgtttttttcgaatttcggatttttagtgaaaggaagggggagggcgcgggcgcggaagggaggtggatcggagcggtagcgcggtttagtcgaacgggtatcgatcgttatttcgcgatttttttcgtagggggcgtcggcgtttaagttgttcgttcggagggtttagagtcgttttttagattagagtcgggggaggcgtagttagtagcgagttttgagcgatttttttttttattcgtttttttgttttagtgaatttttgttagttgaagggagcggggtttttgttcggggaaaaggaaaatagttcgtggtttgggatttgggattttttgtcgtttttagcgtttttttcgtttttcggcgtttttgcggtttagtggtttttgcgcgtcggagttcgtcgcgaagattgagcggtcgcggggatcgtcgcgggtttcgcgcgtatttttgggtttaatattgttatta

SEQ ID NO: 10594 - DNA, 233 bp, synthetic construct
  misc_feature 1..233: note = Description of Artificial Sequence: Synthetic polynucleotide
  source 1..233: mol_type = other DNA
aaataaaaagattaaaggagtagcggtcggggcggtagcggtttttaggtcgggatattcggggtggtgcgttcgggtttgcgggggttgcgtcggcgtcggggaggcggggggagcgggagcgggcgacgcggggaaggggggagttagggggagggcgtcggtcggaggaggggcggattcgttcgttttagtcgagtagagtatagtcgagtcgagcggttcgggcgggg

SEQ ID NO: 10595 - DNA, 213 bp, synthetic construct
  misc_feature 1..213: note = Description of Artificial Sequence: Synthetic polynucleotide
  source 1..213: mol_type = other DNA
tttttttttaaagtaaatagtatttttttattattttgtagttgggttttttttattggttttcgttttttcggtggagacggcgacgtggtttatacgcgagtttttcgtcgaggatgaattattagttagttcgagttgttatattttattttagtatagttatcgcgagagtttcggggtcgcgtcggcgtgttttacgtacgcgtagtt

SEQ ID NO: 10596 - DNA, 236 bp, synthetic construct
  misc_feature 1..236: note = Description of Artificial Sequence: Synthetic polynucleotide
  source 1..236: mol_type = other DNA
cgcgttgagttttattttgcggcggtcggacgtttcggcgtagggggcggcgcggcgggcgcggtgttgggtatcgataacgtgtgcgagttggcggcgcggttgttttttagtatcgtggagtgggcgcgttacgcgtttttttttttcgagttgtcggtggtcgattaggtggcgttgttgcgtttgagttggagcgagtttttcgtgttgaacgcggcgtaggcggcgttgtt

SEQ ID NO: 10597 - DNA, 233 bp, synthetic construct
  misc_feature 1..233: note = Description of Artificial Sequence: Synthetic polynucleotide
  source 1..233: mol_type = other DNA
ttagttgtggatttttaatatttgtaggttataggattagaggttgggtttttaggagtagaggatatagagtagtgaagacgagattcggagttttagcggtagttaaagataaagaagcggataaatttcgttatatttcggaagtcgtttttttcgtttaagttgcgtgtttgattggatagtttttagtttagcgtcgttgattggataacgtttaaaattttattttt

SEQ ID NO: 10598 - DNA, 737 bp, synthetic construct
  misc_feature 1..737: note = Description of Artificial Sequence: Synthetic polynucleotide
  source 1..737: mol_type = other DNA
ttcgttcgatttaggtttcgagtttttttttcgattttttttagtttaaaggttgtattcgttttaggtttttttagttcggttttttagtttttttttcggttttttttagtttggggttcgggtttttttttcggttgagtagtcgggttcgcgattttttttatttttttcggttcgggttttcggttttttttagaggtgaggtaggggttatttagaatttcgcggttttttattttttttaagattattttcgttttagttttttgttttttattttgtttttttaatttgggttttcgattattgtttcgattttattttgtcgttagggattattagtcgtttttttcgcgtttaggggacgcgtagcggtagtttttgttgatggtaagggtttgcgtattcggaaattttagggtttggggcgtggtgcggtttttgcggttagcgggtttcgtttgagttttagggttttttcgttgttggattacgttttttataggttttagggtcgcggatgaatttcgatttttgttttttttttcggtgttgtggttattgagttaagtttggcgagtcgaggtgattcgggtcgggttgcgggaggagttcgcggtgaggtggtttcgcgttgtcgggcgaggtcggtttacgtggagtcgggagtttgaggtttttgtacgcgggagttgcggacgatggtggttagtgttattgtttacgacgttatt

SEQ ID NO: 10599 - DNA, 308 bp, synthetic construct
  misc_feature 1..308: note = Description of Artificial Sequence: Synthetic polynucleotide
  source 1..308: mol_type = other DNA
atagaggtgtagtttagggtttaagatttggttttcgggttttaagtttaatttcgggttcgttagtttagtaggtgcggagttaagtttttttatagacgcggttttttttttacgcgaggtttttaaatttcgtaaattaacggaaatgaagttacgtttcgggagcggtgtttttgggaaatgtagtttagcgtttcggacgtcgtgtttttgggaaatgtagtttagcgtttggttagtcggttagaacgttaggaggttcgggtcgtttatttttcgaggggttcgtgggttcggtttgtgga

SEQ ID NO: 10600 - DNA, 1100 bp, synthetic construct
  misc_feature 1..1100: note = Description of Artificial Sequence: Synthetic polynucleotide
  source 1..1100: mol_type = other DNA
tgatgcgtttggtgattttttttgggtttttgtttaagcggagttataggttgtgggggcggttaggtttttggggaagagtaggtgtcgcggtgtcggcgcgttagtagttcgcggttaaggttatttgtttttagggtttcggtatttttgcggggaggcggtaggtagaggacgcgcgcgtagtcgcgtaggagtttttaggcgagtgggggaagtatcgtaagagacgcggatttggagcgcggttattgcgttatcgtagcgatttgggttatttaagtcggcgggattgagaggtcgttgcgcgtgggtaggggtttagattgcgttcgcggtgtttgtttcggtttttatttcggaacgattgtagttttgcggggttcgtcgtttatatcgcgttgaggacgttgtttaagttaggcgttcgttttcgttcgcggttttagtcgttcgtagcgcgtcgtttttagacgcgcgtggttgttggcgagggttgagatcgcgttttcgtcggttagtttttagtagtagcgtattttttttgtttcgcgttttcgtttcggattcgcgtcgtcgtagtttcgcggtgatgagtttcgagtcggtttcgtcgtcgtcgtcgttttagtgttttggttgcgatcgcgcggagtcgatcgtttagcgtttagaggagggcgacgaggtttttcgcgcgggcgattacgagatggtagtcgagttttttcgttttatgttagtcgggttggcgtagtcggatcgcggtttgtgtttgaggttgggggacgcgttggttcgcgtcggtcgttttttcgaagttttgggcgcgtttcgcggcgtcgcgcggttcggggcgttgcggtcggaggagttggaagagttggcgggcggtttggtgcgcgtcgtgggtttgcgcgatcggtcgttgttcgcggagaattcgggcggcgagttcgaggcgttcggcgagggagggtcggtttcggagtttcgcgcgtttcgcgatttgttcggttgttcgcgttgtcggcggttgttgtataagtcggtgacgttgttttgcgggtttatagtttgtaagcgttgcgtggagttag

SEQ ID NO: 10601 - DNA, 214 bp, synthetic construct
  misc_feature 1..214: note = Description of Artificial Sequence: Synthetic polynucleotide
  source 1..214: mol_type = other DNA
gaagaaataatatattgtagattgtaacgagtacggggagttagcgaaaggtagggcgtttattagggcgcgttgagagatcgggaattttcgtaagggcgttcgcgtcgttcgttattcgtcgtcgcgcgtacgtcgcgttttcgtttatttttaaataatatttatagttagggtttttttttttttttttttttttttttttgttttcgtt

SEQ ID NO: 10602 - DNA, 582 bp, synthetic construct
  misc_feature 1..582: note = Description of Artificial Sequence: Synthetic polynucleotide
  source 1..582: mol_type = other DNA
agtttgttttttttaggaggagttgttttcgtcgttttttcgggttatggtcgacgagcgcggcgcggaggagcggtcgggggcgcgttggggagggggcgtcgggggcgcggcgcgggcgtagaggcggcggggatgtcgggcggttcgggttgcggcgtagtttttttttttgtagttttttttttcgttttcgtcgtcgtcgtcgcggtcgcggtttttttttggtttttatttttgttgttttcgggtatagattttttgtcgtcgtcgcgcgtcggtttttttgtcgtcgtttgttagttttattttttgttatttttttgtttttttttcgttttttttttgtcgttcgtcgcgtttttttttatttcgcgttttttttttttttttttttttttttttttttcgcgggtttttcgtttttttcgtgcgtttcggtcgtttttcgtttttagcgcgtcgttttcggggatgtttcgttttttttttaagagcgtcgggttacggtcgtcgtgttttttggagtttcggcgagggcgggtacgggttttcggtaggtgcggggcgtacgcgggagag

SEQ ID NO: 10603 - DNA, 203 bp, synthetic construct
  misc_feature 1..203: note = Description of Artificial Sequence: Synthetic polynucleotide
  source 1..203: mol_type = other DNA
tttttaggaggcgttttgatttcgtatttcggttttttatttttcgatcgttagttttagggtcgtcgcggcgacgcgcgattttttttttttgaggggcgcgggtttcggacgcgtcgggttttgttaggtatttagtggagggtcggaggtcggcgattagttcgagtttagtcgtttcgggagttggcgcgagtgtcgtt

SEQ ID NO: 10604 - DNA, 823 bp, synthetic construct
  misc_feature 1..823: note = Description of Artificial Sequence: Synthetic polynucleotide
  source 1..823: mol_type = other DNA
taattatttgttttagatcgcgttatttgtaatttgtttcgggttggcgttatattcggcgtttcggcgttttttataagtgttttcgtttatgattagcgtttgtaggggtagttcggagttcgggtggggatagtagcgtagtttttggtcgtagcgcggggtgtagacgtcgtacgtttcgttttttagtcgggcgtatatcgagtagtagtcgtagttcggttttcggacgagtttcgcgtatggtatgcgggcgttttcggttattgcggttatcgcggcgggcggcgtaatcggcgggggttcgtaggcggttaggcgttcgggtgtgtagggcgggtagcggaatagtattttcgcgcgcgtttcgtcgtcgtcgttattcgcgtttagtagtagtagtagtagcggtagtagcggcggcggcggtagcggtagcgcggggtagtttattttcggtagtatgttggcggtcggtagcgcggcgtggcgggcgagcgagcgagcgggcgggcgggtaggtggtacggttttgcgagcgcgggagtcgtttttttcgttttttttttttttttcgtcgtcgtagtcgggttttaaagggtcggttttttttcgttttttgttttttttttttttttttttggagattatttttttttttttcgatattttttcgcgtcggtaagtgagtgcgcgtacgttcgttcgtttattttcgcgttggttgcgggttttgggggttttttgtttttttcgggtttcgttttttcgtatttttttggtttgattatgatttttgaaggagaatacggataattcg

SEQ ID NO: 10605 - DNA, 293 bp, synthetic construct
  misc_feature 1..293: note = Description of Artificial Sequence: Synthetic polynucleotide
  source 1..293: mol_type = other DNA
ttttgtttttaagggagagggatagtattttttcgggtttttagtttttttgggtgtggcgggagagttttgggcgaggttgcgtttatatttgtatttcggtcggttttttcggttgatttcgttttggttgatttcgcgtatattttttttttagcgttgtaaggatcgtttgaattcgttggttatttcggtgatgaattagtggttcggtgtgaagttgcgggtgatcgagggttgggacgaggacggttattatttagaggagtttttgtattatgagggtcgcgcgg

SEQ ID NO: 10606 - DNA, 262 bp, synthetic construct
  misc_feature 1..262: note = Description of Artificial Sequence: Synthetic polynucleotide
  source 1..262: mol_type = other DNA
gcggggtatgttggcgcggttcgagggtacggtattggttcggtttttttttcgcgttcggtttcggcggtttttagtgttttcggtttattgttcgggcgcggcggttgcgggattcgcgtggcgtcggcgacggttcggtttagttttgcgttttgtacgcgcgtttttgttttcgggttcggtagtcgtttttttttaacggggggagggggttattgttttcgtttttcgttttttttggagttaattagcgcgttcg

SEQ ID NO: 10607 - DNA, 240 bp, synthetic construct
  misc_feature 1..240: note = Description of Artificial Sequence: Synthetic polynucleotide
  source 1..240: mol_type = other DNA
gttttttttttattgttttttcgttattagtcgtttttgtcgtcgagttcgtagtcgttagcgcgtttcgagtttttttaggttagaggttttcgtaggcgatggcggataagagggcggggattttagaagtcgcggcgcgttcgtcgttcggttttgttcgggagggggacgcgcgtacggttttcgcggttcgggttcgagaagttggggggcgcgggtttttttatttcgtagcgg

SEQ ID NO: 10608 - DNA, 1240 bp, synthetic construct
  misc_feature 1..1240: note = Description of Artificial Sequence: Synthetic polynucleotide
  source 1..1240: mol_type = other DNA
ggcgtttttgcgtatagtggttatttggggtcgtattttatgtttgtttgagttttttcgcggcgggttgacgtcgggatttgtttaatcgttataaaacgtttaaataaaaatagggtcggttttttagtagtggagagttattcggagtatcgtttcgggtcggtttcggtttcgaggtttcgggggtttaggatttcgtgcgtgtggcggggaagaggaatttagagtttttgggttgttgtttttttcgtcgtttttattgtgaatattgtgcggtggggtgaacgcggggagcggcggggttagtggagtcgaattttagggttttgcgattgtattcgttaggaggggttttcgtttggtttgagaaaggttttttgaggttaagagttgggtttgaatataattttcggagtttcgagttcgttttttttaatatataaatacgcgtagatttttagaaataggaacgtacgatatatacggttagaagtcgcgaggatatatagagcgtcgtttattgggcgggggtcgtttgggaataaagggtttaggaggcgttgtttcggcgtttattttgagtttttttgggggtgatacgggatgggggtggggtgtaaagggaattgagggaggagagtgcgcgaggaggggaaagcggtgatttggtttagaggtggggcgcgtattttaggcgagcgtgcgtgggtcgggatttgtagggtacgggggtgggtttaggttggtcgttttatttcgttttagcgtttcgttaggttttcgtcgtttcggggtcgttcgggtcgttagttagttgacgcggggggcgggggagttgttaggcgcgtttcgttttgcgtcgttgggtcgcggaggtcgtgtagttattggttcgcgtatcgggtcgttcgggttttcgtattttagtgatattaggaggcgataaaaggttgcggcgtcgtcggatttagtatagttgtatcgtcgagttgcgagcggttgcgagcgagagagcgtaagagtaagagagttagagagcgagtaacgggtattcgttttacgtttttttttagttttatcgcgcgtttcgtttgtttttttatttcgttcgattttattcggttcggtttttgcgcgggtatagtttagagttttggggcggtgtaggtagtttcgggatttttcggcgcgtcgtcgcgtttttagataaaggtttggtcggcggtttcggttcgtt

SEQ ID NO: 10609 - DNA, 222 bp, synthetic construct
  misc_feature 1..222: note = Description of Artificial Sequence: Synthetic polynucleotide
  source 1..222: mol_type = other DNA
aataaaaatttatattatatagcgatggtggtgtttggtggcggtggcggggtggggggtttgattagatgagtcgtttttcgcgttttcggcgtcgggcgttatggttcgagtcgaaggcgtttttggtttcggagcgttcgcggtttttgcgtttggcgcggtcgtttaagtaggagaagaaggcgtagtttaggaatattcggaagtagtaggtcgttt

SEQ ID NO: 10610 - DNA, 714 bp, synthetic construct
  misc_feature 1..714: note = Description of Artificial Sequence: Synthetic polynucleotide
  source 1..714: mol_type = other DNA
tgtgattttttttttttgttttaagtggttggcgatatagttttcggcgcgtcgggtattgaggttttggagtatagcgtggggggtttggtatagatacgatttacgatcgggtcgattttcggttagaaagaattatgtttcggtcgttcgggtcgcgggttcgcggtgtatttttgtaggtttttattttgtttcggtagaggtttgtaagaattttgtgggtgtttttcggagcgggtagaggaggagtttagcgtcgaggtttaggcgcgtttcgttttcgttttttttcgtgtttttttttcgttgttttttttttaaaggtcgagatttggacgttgttcggtggtttcggcgggggttttgtttttggtcgttgtttttttgaattttaggtgagaagaataaaacgttttgacgttgttcggttttcggtttttggagaggacgggtcgtttttgtcgagagaattgtgcggaattaggaagcgttggtgttttttcgtttttacgggattaagcgaaattcggttttaaacgaagtaaagtcggttgttttttggagtatttttgttatagtatttttattttgggttagggtattttgttgcggattttgagttttaggaaggaggtttataatagcggaaagttatttttttttaagaattgttgagtttttcggattgtatttttaaagattttttttgaa

SEQ ID NO: 10611 - DNA, 1216 bp, synthetic construct
  misc_feature 1..1216: note = Description of Artificial Sequence: Synthetic polynucleotide
  source 1..1216: mol_type = other DNA
tttattttgaggttttttagatttcgtagggttttttacgttattaagtttgtttcgattttttttcgttgttttttatattttttgtcgcggcgcggtcggttagggatttatttcgaggtttagttggtgggggtgttggggtgcgcgcggattcggtatttacggcggcggcggcggtagtagtagtaggaggaggagaaagacgaggaggaggaggaggattagttgagcggcgttttttttttagttcgtagcgcgtattggttttttggggtattttcgggagagtattaagatcggagattaggcggcgatataggtaatcgttgttgtacggggttgggtttagtcggtttttagaggttagggtagggggaggtaggattgggaaggagggtcggagaagtggggtgtagagggcggggtagcgagcggttaggttcggaggaaggcgttttaggcgtttagggatgtcgtcgttcgggttgacgtcgtcggttttttttttcgttaggcgggcgtttgtagtcgcgggcgtacgggtttcgtttcgtttatcggttcgttgtcggcgttcgcggtgcgtttcgttttgtgtttttcgtagtcggcgtgtatttggtgtaagtaaaggcggttagttgatgggtcgcgcgcggattggttgtttcgtcgtttttttttttttcgttcgatttttttcgcggtttttcgttttcgttttcggcgcggtttcgtgttgggtattatttgtggatcgtttaataaaggcgtagcgcggcggggttcgggtggtcgggtcgcggtcgtcgttttttgtttaggggacggtaggttgcggttgggtagggaggcgaagcgtattgtcggtttttagtaaaagatagattaaaagaaaatatacgttcgtgttaggaggttagttaggtataatggggttttatttttttgcggcgtagaattcgggttcgggggttgagaattagatatagttcggtttggggttgtgggagttaagtttcggggtgaaattcgattttgcgttttaaaatatagggcgcgttttcgggttgtgtgtgcgcgttcgggggcgtttttcgtagatttggttcgggtcggtgtttttgtcgcgggaaggaggattcggacgtttaatttagcggcgaagtcgttttttattggaggaggtttttcgaaaacgtttttgaaattt

SEQ ID NO: 10612 - DNA, 207 bp, synthetic construct
  misc_feature 1..207: note = Description of Artificial Sequence: Synthetic polynucleotide
  source 1..207: mol_type = other DNA
ggtttgtttagtttttatttcggtatcgaagtcgtagttttcgggtttattttcgtatttttaggggttttcgggggttgtcgataggtttttgattagcgagcgcgttttcggggtaagtatttttggcgggtagaaatttgggagcggagtatagcggtgtaagggaatcgtgttaggcgggaagggcggaatttgcggggaatt

SEQ ID NO: 10613 - DNA, 253 bp, synthetic construct
  misc_feature 1..253: note = Description of Artificial Sequence: Synthetic polynucleotide
  source 1..253: mol_type = other DNA
ggttgcgtagcgtttttaatttaatttttggatttattttcgttttagtttttttcgtgtttagcgttttttgtaaatgattttttcggtcgggtgtttcgttttttttttcggtttttttcgcgtggtttgtttttcgttcgtttgcgttcgttcggtttttttgtttttgcgtttttatttgatcgtaaaggcggttagggtagttttcgcgcggtttgatagttacggtttttagtttgtttttggacgt

SEQ ID NO: 10614 - DNA, 209 bp, synthetic construct
  misc_feature 1..209: note = Description of Artificial Sequence: Synthetic polynucleotide
  source 1..209: mol_type = other DNA
ggttaggtttgagttttatttatttacgtcgtattttttttttttcgtgggggtttatatggtcgtgtcgggcgcggtttcgcgggcgcggcgatcgggcgataacgcggcggggacggtcgcgggttcggttgtggcgtatcgcgagtcgaggcggggacggttaggcggcgcggggtagtgggcggcgtattttttataggtcgttc

SEQ ID NO: 10615 - DNA, 225 bp, synthetic construct
  misc_feature 1..225: note = Description of Artificial Sequence: Synthetic polynucleotide
  source 1..225: mol_type = other DNA
ttgcgatcggtttttaatttgggtcgagttgcgtagcggggcgggcgcgcggggcggggcgggtcgcgggttttggggagttggtcgggaatcggagttcgcggtcgtttggtcgaatttgttcgcgcggcgtcggggaggagttcggggcggcggcgcggggcgcgcgttcggcgagggcgttttttttagggtcgtttgtagtttgcgggacggggtcgagcg

SEQ ID NO: 10616 - DNA, 1133 bp, synthetic construct
  misc_feature 1..1133: note = Description of Artificial Sequence: Synthetic polynucleotide
  source 1..1133: mol_type = other DNA
ggaggagaagcgacgtaagtgggtagttttttagcgtcggcgaggcgcgggaggaggagaagtagtggggaggcgtagtcgtttatttgcggggtagggcgcggaggagggattcgggttgcgcgttttcgggtcgaggaattaggacgcgttcggagtttcgtacgcggttaagttcggggcgtttttttttttcggtcgggcgaatttaaggggcgtagttttttgttttgatagagttggtcggcggaggcgtgtagagcggcgagtcggcgagttaggttgagaaattcgagtcgggaataaagaggggtcggattgagtgtgtgtgtcggttcgagtttcgggtagaggtatttgggttcgaggttttcgttgtgatttttcgagatttcgtagtgttttttattgcggagttttcgcgtttgtcggtaaaaattttatttttggtaaatttttttttttttttttttttttttcggtttttattttttgttttttttttttttttagtagattaaatgagtttcgagaagaaaaatcgaagcgaaagggaagaaaataagaagatttaaaacggatatttttagcgtgggtggttttttttttttttttttttttttttattttttaggaagtggacgtttcgttattttttgatttttgtatttttttttggggtaaacggggtttttttgtttagatttttttttttttttcggaaaataaattattaagtcggtattcggggtaattatagtggagagggttttcgcggagacgcgtcgtcggatttttttttgtattttggggaggcgtgttttttttagaatcggcgtttttcgcgcgtaaatttcggcgacgcggggtcgcggggtggtcgtcggggtagtttcgtttagcgcgcgtcgcgtagacgttttcggagtcgttagttatcgtagttttcgtcgtttagtgtttttcggtttcgggggcgggcgtttgcgtcggttttcgcgaagcgggaaagcgcggcggtcgtcgggattcgggcgtcgcggtagttgtttcggttgtcggtcggcggtttcgcgttcgttcgtttcgttttcgttcgttgttttgttgtacgaatttttttaatttttttt

SEQ ID NO: 10617 - DNA, 478 bp, synthetic construct
  misc_feature 1..478: note = Description of Artificial Sequence: Synthetic polynucleotide
  source 1..478: mol_type = other DNA
tgaattgagggggttcggcggtcgttgaggaggggagcgcgcgggaggaggggcgaggagttcggaggcgggcgcggttggtagtttagagggttcgggcggaggtttgagagtagggttggaggggcggaggatcggggagattcgttcgcggcgttttcggtcggttttgagtaggcgtcgtggtagcgttcgcgttttttgttcgtttttcgtcgtcgttaggacgtaggttcgcgttagggttggcggtagggttcgtagttgtcggtttggcgtttttatttcgcgtagtcggtttcgtttagttttttcgcgtttgattggtcggattttgtttttggcggaggtaattgttcgcggattttttatttcgcgattttggttttttcgtaagtttttcggattcgggcgttttcggtttttttttatttatttttttgtcgggtaggttcgcgatttttcgtttttcgggtcg

SEQ ID NO: 10618 - DNA, 201 bp, synthetic construct
  misc_feature 1..201: note = Description of Artificial Sequence: Synthetic polynucleotide
  source 1..201: mol_type = other DNA
ttaatgtgttttaatacgttttaatgtgttgtgataggaaaagagtcggttaacggtattacggaagtattagttggtatagaggttcggtgtaattatcgttttgtatcgtaaaacgggtttaggaagtttttaggagatattagcggtgttagaatcgagaaagtgacgatatagataatttatggatttcgcgtacgg

SEQ ID NO: 10619 - DNA, 208 bp, synthetic construct
  misc_feature 1..208: note = Description of Artificial Sequence: Synthetic polynucleotide
  source 1..208: mol_type = other DNA
gttttcgtcgtcgttcgggtcgcgttcgtttcgtttttaggcgtcggtttcggagttcggttcgcgagtagcggcggttgtcggagggacgatgagttgcgcggggcgggcgggttttgttcggttcgtcgcgttcgttttgttgatttgtagtttgtggtcggtacgggtagataacgcgagttaggagtattatacggcgtttatt

SEQ ID NO: 10620 - DNA, 210 bp, synthetic construct
  misc_feature 1..210: note = Description of Artificial Sequence: Synthetic polynucleotide
  source 1..210: mol_type = other DNA
ttagtttttcgggaagtagtaggcgtacggtcgtttggatttttttggaggtgatggtcgagcgtttgttgtaatgcgttaggcgggaagtttcgtcggcgatgcgttcgaagatgtcgttgataaaggaatttatgatttttatggttttagaggagatgtcggtgtcggggtggatttgttttagtattttgtatacgtatacggagt

SEQ ID NO: 10621 - DNA, 229 bp, synthetic construct
  misc_feature 1..229: note = Description of Artificial Sequence: Synthetic polynucleotide
  source 1..229: mol_type = other DNA
ttttaagatagggtttttttttcgttcgggttggagtgcggtggtacgattttcggtcgttgtaacgttcgtttttgggtttaagtgatttttttgtttcggttttttgagtagttgagattataagcgttagttattatagttcggttaatttttgtattttttagtagagatagggttttattatattggttattttggttttaaatttttgagtttaggtgagtta

SEQ ID NO: 10622 - DNA, 209 bp, synthetic construct
  misc_feature 1..209: note = Description of Artificial Sequence: Synthetic polynucleotide
  source 1..209: mol_type = other DNA
tttttttttttttttaatatttttttttagaaaaagaggaacgtaacgaagggagtttagttattatgttggagttgtggatcggttttgtgaggtttacgcgggagcgcggaggtttttgggttttagggcgtcggtagatggtttgtagcgtatcgttcggttttcgcgttggttacgttcgttagcgttatttttttttttcgttt

SEQ ID NO: 10623 - DNA, 255 bp, synthetic construct
  misc_feature 1..255: note = Description of Artificial Sequence: Synthetic polynucleotide
  source 1..255: mol_type = other DNA
gttatttcgtagcgagttaaagttattttttattttgggttcgttacgcgatttttgtcggttttcgttttacgcggttttagtacggcgttaaggtttcgtttataaatcggtttcgttttttcgtgttcgggttcgtcgtttattagacgtcgtttcggcgtagcgagttgagggtacgtttatttttttttcgggtttttagtttttaaggttttagtataatgttttaggaggaagattttaggttttttt

SEQ ID NO: 10624 - DNA, 297 bp, synthetic construct
  misc_feature 1..297: note = Description of Artificial Sequence: Synthetic polynucleotide
  source 1..297: mol_type = other DNA
tttattattgttaacgtcgtcgtcgcgttttttttattttatttttttttttttaggagaatttttagtttcggtttttttcgtttcggcgtttcgttacgtgatttcgggtcgttttttatacgtgatcgtttttttttttttttttattttcgtattcgttttttttttagttttttgtttcgttttgttggtcgttaggtatttcggggagaggtcgtttggaggcggggttttaggttttatttttcggagggtggagaggggcgggtaaattacgtcgagtgggcggggttt

SEQ ID NO: 10625 - DNA, 232 bp, synthetic construct
  misc_feature 1..232: note = Description of Artificial Sequence: Synthetic polynucleotide
  source 1..232: mol_type = other DNA
tagtcgttttaagtttttttttttttttttttttttttttttgtttcggaaagttagcgagttttcggtagcggtcgtattttcgtttcggtggtttgacgacggcggcggtcgtttttgcgcgttttttcgttttttttcggtttagtttagacgtcgtagtggcggtaattgcggtagcggtggcggttttgatttcgcgtatttcgttttttttttttagttagtttat

SEQ ID NO: 10626 - DNA, 247 bp, synthetic construct
  misc_feature 1..247: note = Description of Artificial Sequence: Synthetic polynucleotide
  source 1..247: mol_type = other DNA
tttttcgcggttttttttttttcgcgtttttttttttatatcgggttttcggggtagtagcggggaggggagatcggcgggggagggaggatagggaggcgaaggaattggggtggggggtgcgtgtgtggtggagggggtgggacgatataggtgttttgaggggaggagtcgggaggaaggcgaggaggtcgggttaagtgggggtgcggaggtcggggagataggaacgcggttgcgggcgcgg

SEQ ID NO: 10627 - DNA, 292 bp, synthetic construct
  misc_feature 1..292: note = Description of Artificial Sequence: Synthetic polynucleotide
  source 1..292: mol_type = other DNA
gggcgttgaggttgaagttggggtcgggggtgggattgggggcgttggggttgggtcgggggtgggattgaggttgcgggcgtttaattgggattgagtcgagggtagcggtggggttgggtcgggggagtaggggtcgcgtcgggtagcgtcgcgtgttggagcggaggcgggtgcggtcggggtaggtcgcgggaggaggaagcgtttggggagtaggagttgggtcgggcgggttcgcgtttcgtattcgcgggggtgaatcggagtcgtcgtagggggttcggggggt

SEQ ID NO: 10628 - DNA, 201 bp, synthetic construct
  misc_feature 1..201: note = Description of Artificial Sequence: Synthetic polynucleotide
  source 1..201: mol_type = other DNA
tgttgtggggtttagggttgtatggggtagtaaggcgcgggggttcgggtcgtagagttttcggggaggattcggaggggaggtagtggttcggcggttcgggttatagttcggtgtggtgggggggagggagacggggcgggagagggggtaaggttgtttttgaagggaattagttggttcgttcgttggtcgagttgt

SEQ ID NO: 10629 - DNA, 201 bp, synthetic construct
  misc_feature 1..201: note = Description of Artificial Sequence: Synthetic polynucleotide
  source 1..201: mol_type = other DNA
atttttgttttttatatttattttttattttcgttttagaaatacgttttttatatcgggttcgtcggatttttatattttttattcgcgttagaaacgcgcgtattttcgtggtttttttttgtcgcgcgtaaatacgttcggttcgcgtacgttttttcggtttggtttcgtatattcgcgttagaaatacgcgtggtc

SEQ ID NO: 10630 - DNA, 201 bp, synthetic construct
  misc_feature 1..201: note = Description of Artificial Sequence: Synthetic polynucleotide
  source 1..201: mol_type = other DNA
cgacgttcgagttagcggagttcggagtcgttgggtttttcgtttttttcgttcgttcgtttttttcgttttttcggtttttttcgtttcgtcgttttgcgtcgttttattataaaaggtgaggttcggggggagggggcgcgggattttcgtttcgcggaagcggtttttatttgttttttaatttgttcggtcgcgttt

SEQ ID NO: 10631 - DNA, 201 bp, synthetic construct
  misc_feature 1..201: note = Description of Artificial Sequence: Synthetic polynucleotide
  source 1..201: mol_type = other DNA
gttttattaagcggttttagttataacggcgtgtatgttaattacgtttgtaggttatcgttcgttttcggttgtcggattatttagcgcgttttttttcgagtttcggacggggagaggaggagttaggggaggaggcgggaggaagggaaggatggggaggataatgggggaagaagagggaggatggaggaagggggt

SEQ ID NO: 10632 - DNA, 201 bp, synthetic construct
  misc_feature 1..201: note = Description of Artificial Sequence: Synthetic polynucleotide
  source 1..201: mol_type = other DNA
tattatttcgttgtcggcggcgtttttttgggaagtagtagtaattggtggagttggagtcgtagtagtttgagtcgtcgtagtagtttttgtcggagtcgtagtaggaggaggaggaggcgggcgtcggggtgggcgtcggggcgggatacggagcggggttttgggacgattttttggaaaagtttttggcggaaacgg

SEQ ID NO: 10633 - DNA, 201 bp, synthetic construct
  misc_feature 1..201: note = Description of Artificial Sequence: Synthetic polynucleotide
  source 1..201: mol_type = other DNA
gggcggggtcggaggaaaaggggcggggcggcggggaaaatataaattaaaatttaaaaattagttaaaggaaggatggaagtttcgcggttttttcggcgtttagcggtgtttttgttttggtgttcggattttagttcgcggtttgtttgtttgttagtttcgtggatatcgtattgtcgggtagcgtttcggtcgtat

SEQ ID NO: 10634 - DNA, 201 bp, synthetic construct
  misc_feature 1..201: note = Description of Artificial Sequence: Synthetic polynucleotide
  source 1..201: mol_type = other DNA
tagtatgatgtcgtttttttggtagtggtagggggtcgggtaggcggtgggtttcgggtcgggttggggggcgtcgtcggtttttcgggaagcgtatagcgcggcgtaaagttatagcgttcggagtttcggcgggttgggtatttcggcggtcgggttattggggtatttggcggtcgggcgcggacgtacggcgcgatg

SEQ ID NO: 10635 - DNA, 241 bp, synthetic construct
  misc_feature 1..241: note = Description of Artificial Sequence: Synthetic polynucleotide
  source 1..241: mol_type = other DNA
cgaagaaaggggcgcgggggcgcgggggcgcgggggcgcgtggggcgttgggcgtcggaggtttggtaggatgcgcggtggggtcgtcgtcgtcgtcgtcgttgcgcgttcgttttttggtcgggcgcgcgtttcgtttcgtagtatttatagggcgtcgcggtttcgtttttttataggtttcgtttcggttagtttacgtttcgttttcggtttcgttttttgtcgttagggcgcgtag

SEQ ID NO: 10636 - DNA, 201 bp, synthetic construct
  misc_feature 1..201: note = Description of Artificial Sequence: Synthetic polynucleotide
  source 1..201: mol_type = other DNA
gtcgttgtcgttttgtcgttcggtgtgcgagcgcgttaaggtcggttgcgcgtcgtttatgcgttagtacggtttcgtttggttcgatcgtatgcgttgcgatcggttgttcgagtaaggtaattttgatacgttgtgtatggattataatcgtatcgatttaattatcgtcgcgtttagttcgtcgcgtcgtttgtcgtc

SEQ ID NO: 10637 - DNA, 201 bp, synthetic construct
  misc_feature 1..201: note = Description of Artificial Sequence: Synthetic polynucleotide
  source 1..201: mol_type = other DNA
agaggaagtgagaggtgtttaattcggttatgtagaacgtagttgggttgttcgaaacgaaataaagcggttatttcgaaggaggtgttgtttttgggtcggtttaggttgagttagagtagacgttatttttacgttaaaaatattaggttattgttttagggagttgggttatttattgaggttatttttattttattt

SEQ ID NO: 10638 - DNA, 201 bp, synthetic construct
  misc_feature 1..201: note = Description of Artificial Sequence: Synthetic polynucleotide
  source 1..201: mol_type = other DNA
gtatttatttttttgacggtttcgtttcgtagggagggtttgtgtcggttgttggagtttattcgtagatttatttttattattttcgagggttagaggcgcgatttcgcgtattcggcgtttcgtttgttgcgttagtatcgttatttggtgattttgttgttttggaggttcggtttcgtggtgcggagtaggcgcggg

SEQ ID NO: 10639 - DNA, 201 bp, synthetic construct
  misc_feature 1..201: note = Description of Artificial Sequence: Synthetic polynucleotide
  source 1..201: mol_type = other DNA
ggtttttggagttattggtttagggcgggttcgcgggatggggcgggcggttcggggcgtagtcggttaggtcgttgttatggtaacgcggtggaaaaacgggtttttgggtatttcgttgtcggtcggttggtaattttttagcggagggatcgggtcgagttcgcggattttttcgagtgttttttggggtttagtcgt

SEQ ID NO: 10640 - DNA, 201 bp, synthetic construct
  misc_feature 1..201: note = Description of Artificial Sequence: Synthetic polynucleotide
  source 1..201: mol_type = other DNA
ttaaaagtagtttttttgaattttatttgggttttgtagggttttttcgaggttcgagaattgggagaagggaaagagtttatcggtttgtttgaaggtcggcgggcggtgtaggtagttttttttagatttttttagtttcggttttttacgtatattagaagagtcgttttttttttttagtgattgaaattatttgga

SEQ ID NO: 10641 - DNA, 201 bp, synthetic construct
  misc_feature 1..201: note = Description of Artificial Sequence: Synthetic polynucleotide
  source 1..201: mol_type = other DNA
ggttttgttttagggttttgtattttcgagagttgttgtatgtcggggattggtttttaagtttgtttgagtttttttagtttttcgggtatcgttatgcggtgggagggtgagttttttttttttgttgaaatttcggcggtttggtaatcggtcggggggttttggatttttcggggagatattattgatgttttgtgg

SEQ ID NO: 10642 - DNA, 201 bp, synthetic construct
  misc_feature 1..201: note = Description of Artificial Sequence: Synthetic polynucleotide
  source 1..201: mol_type = other DNA
gtgtttttcgttgatttttagaggagatattggttagggttttttttttcgagataaattttattttggaaaggttgttagatcgggcgcggtgatttacgtttgtaattttagtattttgggaggatgaggtgggcggattgtttgagtttaggagttcgaaattattttgggtaatatgttgaaatttcgtttttatta

SEQ ID NO: 10643 - DNA, 201 bp, synthetic construct
  misc_feature 1..201: note = Description of Artificial Sequence: Synthetic polynucleotide
  source 1..201: mol_type = other DNA
gtatatttcggtcgggtgcgggtcggcggggtatagcggtttttacggttcgttttcgttagttatttttcggttttttttttcgttgttcgcgtgtttcgggtcggtttagtatttttcgagttacgtgttcgcgtttttcggcggggaggagcgtagtcgcgggggcgcgtttcggtgatttcgttttttagttttttt

SEQ ID NO: 10644 - DNA, 201 bp, synthetic construct
  misc_feature 1..201: note = Description of Artificial Sequence: Synthetic polynucleotide
  source 1..201: mol_type = other DNA
ttttcgcgtatcgtcgtcgcgtatttatttttacgggtggagcggggcggggtagtacggtttcgcgcgtagtttcgattcgttaggcgtatcgatcggcggcgtagcgttggcgcgacggttcgattcggtcgggtttttgtttcgggcgcgggttcggtttgggagcgggcgagttcgtttgtaggggaggcggggatt

SEQ ID NO: 10645 - DNA, 201 bp, synthetic construct
  misc_feature 1..201: note = Description of Artificial Sequence: Synthetic polynucleotide
  source 1..201: mol_type = other DNA
ggggcggagcggggaggggcggggcggagcggggaggggcggggcggagaaggatcgtagggttgagcggggcgttagcgttagtgttcggtattgtttcgggttgggttttttgcgttagaggaaggggagttcggggacggggtacggggttcgcgaggtacgggtgttttttcggggtttcggaagttttttttttcg

SEQ ID NO: 10646 - DNA, 239 bp, synthetic construct
  misc_feature 1..239: note = Description of Artificial Sequence: Synthetic polynucleotide
  source 1..239: mol_type = other DNA
gagaggaagggggaaggagatagaggaatcgagattggggtgagggagcggtcgcgcgtggttttcggagaggcgtttattatttgcgtggcgttttttcgcgtcggagtgcggttttgtttttagcgttagtgcgtcgcgcggttcgtcggtttcgtaggattggttatcgttttttatttatgtaatttgcgtgtgcgtgtgcgtgtgtgtgtgtgtttttttttcgttcgtttttt

SEQ ID NO: 10647 - DNA, 201 bp, synthetic construct
  misc_feature 1..201: note = Description of Artificial Sequence: Synthetic polynucleotide
  source 1..201: mol_type = other DNA
ttttttcgtgggtggttttcgtgagttttttggttagtttttttattttagttttataatggtttatcgtttgtaatattttttttgcggttatagtttcggtggatggaggtaggagggggttacggggtgggggagatggatgcgaagttggcggggaaagggagaaggaaatgggaagggatgggtggaaacggaaaa

SEQ ID NO: 10648 - DNA, 201 bp, synthetic construct
  misc_feature 1..201: note = Description of Artificial Sequence: Synthetic polynucleotide
  source 1..201: mol_type = other DNA
ttatttgaaattgataggtttgttttttatgataatagttgttattaattagttttttttatatttttttatttatcggttttagtattttgtatatttcgcggagaattcgtttttggttttttatagagtatagtattagggtgtagattattatatttatagagttattagttatttggtgtatgtttttttcggtag

SEQ ID NO: 10649 - DNA, 201 bp, synthetic construct
  misc_feature 1..201: note = Description of Artificial Sequence: Synthetic polynucleotide
  source 1..201: mol_type = other DNA
aaaatagtagttttatggaaaataatagaaaaaaattttattttagtttggtaattaacggttggtcgggggacgtgttcgcgttgtttttttttcggtcgttagggggcgtaggaagaagttttggaggtttgtttcgggatcgcgtattcgtttttttttttcgttagttttttttttattttcgttgagtttcgtttc

SEQ ID NO: 10650 - DNA, 201 bp, synthetic construct
  misc_feature 1..201: note = Description of Artificial Sequence: Synthetic polynucleotide
  source 1..201: mol_type = other DNA
gtttgacgaagttttttttgggggtcgatgttttttttcgggtgggaaggggcgttgtcggtgagggttattttggcgtcggtttgcgtcgttcgaagtcgggggggaggggaggttttcgtttagtaggggttacgttcgtttcggacgggggtcgcgcgggcgtttaggcgacgtattttcgtcggggttcgtgatcgt

SEQ ID NO: 10651 - DNA, 201 bp, synthetic construct
  misc_feature 1..201: note = Description of Artificial Sequence: Synthetic polynucleotide
  source 1..201: mol_type = other DNA
ttttgagaagtaatagatttcgattaatgtgtatcgttttcgcggcgtttcgtcgcgttcggaatcgttgtttatttggcgttcggtaaggaaggttgtcggagggtttataggtgtttttttcgttttcggagaagttcggtgtgggcggcgttattttagaaacgttatcggcgcgtttgtttcgagcggcgggggcga

SEQ ID NO: 10652 - DNA, 201 bp, synthetic construct
  misc_feature 1..201: note = Description of Artificial Sequence: Synthetic polynucleotide
  source 1..201: mol_type = other DNA
tttgttatttgtatttaagatggatttttcgttgtcgtcgttgttttttcggtttttttgttattattttttacgttttgtagttttgttttttgtttacgggttgttaagtcgcggtttggtcggtggtggtagtggcggagttagataaagttttcgtttttttcgttttagagttttttaggcgttttaagtggcggg

SEQ ID NO: 10653 - DNA, 201 bp, synthetic construct
  misc_feature 1..201: note = Description of Artificial Sequence: Synthetic polynucleotide
  source 1..201: mol_type = other DNA
ttttagggcggtcgtttttattttcggtttttatttagcggggatttattagggcgagggttgaagatttcgcgggacgtcgcgcgtcggggatagcgacgtatttatttttttagttatttgggaggttgtaggttcgggtcggagttcgaggtttaggggcgcgcggagtagttttggttaaggcgtagggcgcggggt

SEQ ID NO: 10654 - DNA, 201 bp, synthetic construct
  misc_feature 1..201: note = Description of Artificial Sequence: Synthetic polynucleotide
  source 1..201: mol_type = other DNA
ttttggggtcgggcggggcggggcggggtaggggggtcgggcgcggtttacgcgttttttcgagtgcgcggtgcgggacgggcgcggttgacgcgttttcgtcggtgtttgtgttttttcgtaggttaggagggtattttgcgttgttattcggatttggcgggtagcgagttgtagcggggtacgtttacggtcgagtcg

SEQ ID NO: 10655 - DNA, 201 bp, synthetic construct
  misc_feature 1..201: note = Description of Artificial Sequence: Synthetic polynucleotide
  source 1..201: mol_type = other DNA
cgggtttggataggttagtttgagagtatgcgaagtcggttttcgggtagataataagagatatcgtcgggaagtgttaggaatttcgcgcgttgttcgcggggtttttttgtagtcggggttgggttagaaggatggtaaagttgcgcggcgtcgttcgggttggagtcgtagtcgaggagtcgaagtttttttaggtcg

SEQ ID NO: 10656 - DNA, 201 bp, synthetic construct
  misc_feature 1..201: note = Description of Artificial Sequence: Synthetic polynucleotide
  source 1..201: mol_type = other DNA
gattcggagttacgcggggcgggggtcggtatcgagggtcgggaggcgcgaagggtacgcggcggcgggaagcggggcgattcgaaggtttacgggggtcgggaggttgcggggcgttcgggattttttttcgggtggttatcgtgcggtcggggcgcggaagttagaggtgtttagaggcgtcgatttcgtcgaggttgc

SEQ ID NO: 10657 - DNA, 201 bp, synthetic construct
  misc_feature 1..201: note = Description of Artificial Sequence: Synthetic polynucleotide
  source 1..201: mol_type = other DNA
tagtcgaggtagaaattcgtttcgaggcgcgggcgtcgggttcgggttttaaggatgcgcgtcgggttttttttcgcggggatagtcgagtttcgtcggcgttttaggtgttttcgtagtgcgttcgggcgcggacgtttttttgttttcggaggggaagcgggagggtttttggggtaacgtttcgatttcgggtttttt

SEQ ID NO: 10658 - DNA, 201 bp, synthetic construct
  misc_feature 1..201: note = Description of Artificial Sequence: Synthetic polynucleotide
  source 1..201: mol_type = other DNA
tataggtgttttcgtcgtaggtttcgtatatttatttatggtatttatataggggttcgaagaatatgttcggtttagttacgtggtagatgtagacgtcgtagtcgtagcggtttcggtcgtggtatagcgcggttttcgggggttgtttaggtgcgcggtagcgtcgtttcgattcggttcgggatagtttgtaggcgg

SEQ ID NO: 10659 - DNA, 201 bp, synthetic construct
  misc_feature 1..201: note = Description of Artificial Sequence: Synthetic polynucleotide
  source 1..201: mol_type = other DNA
agatcgttgtttggttattttacgtttttgagttttttatatagttagtttcgtgattttcgagtttcgtgattttcgagtttcgtgatttttaagtttcggaagtcgttgtaggtagcggtttagttaggtttcgttttttttatcggagttttacgcgttaattttagttaggtttcgttttcggtcgttttaggcgtg

SEQ ID NO: 10660 - DNA, 201 bp, synthetic construct
  misc_feature 1..201: note = Description of Artificial Sequence: Synthetic polynucleotide
  source 1..201: mol_type = other DNA
gtagtagtttatcgaggacggggattcgtaagtggcggaggttcggggttgggggtcgtcgggagggcgggacgcgcgcggtttgggggtgggaggcgtcgggtttggagttcgagtcgggggattagcgatgtagtcgggcgggcgtcgcggtatttcggggtttttgtatcgtttcgaacgttgtagggttgtagggtc

SEQ ID NO: 10661 - DNA, 201 bp, synthetic construct
  misc_feature 1..201: note = Description of Artificial Sequence: Synthetic polynucleotide
  source 1..201: mol_type = other DNA
attttgtaggtcgtatttttaattcgtattttatttaggttttcgtttggcgtcgatttgttttagtttaattttcggtttcgtagattaggtatttttcgggacgcggggtagattttgcgttcgggttttttttcgtagtcgggttgttcggtttttgcgcgcgtataataggcggtacggcgtagttttcgggagcgc

SEQ ID NO: 10662 - DNA, 201 bp, synthetic construct
  misc_feature 1..201: note = Description of Artificial Sequence: Synthetic polynucleotide
  source 1..201: mol_type = other DNA
aggatggcgatggtattggcgcggattttttttatggtgggtagacgggcgttttaggtgggggattgggtcggcgtgttttcggggtcggggcgggggcgttcgtagttttagttgtttgttttcgttcgcgtttagttgtttagttttgtagagtagaaaaaggagagaggtgggggggcgggggggtgatagggagag

SEQ ID NO: 10663 - DNA, 201 bp, synthetic construct
  misc_feature 1..201: note = Description of Artificial Sequence: Synthetic polynucleotide
  source 1..201: mol_type = other DNA
ttagttttttttgagggagtttagcggtgcgggttcgtttttttttagtttagtttttttgatatcgttttttttttggggacgttgtttgcgggttcgcgcgttttcgttttcgatttttttgtaggttttttcgggggtcggggtaggatcgtatttatcgaggattcgggcgttggagttagtagtagcggtacgagt

SEQ ID NO: 10664 - DNA, 201 bp, synthetic construct
  misc_feature 1..201: note = Description of Artificial Sequence: Synthetic polynucleotide
  source 1..201: mol_type = other DNA
taagtcgaagtttttgaaggaggttcggtgttatttcggtgtgatcgcgtttcggcgacgttgggtagggtgtagggagttagttcggtcgcggtttagcgggaggggagggggtcggtttcgaattcgggcgttcgggtcgcgggtgatttattgggaacgttaggttcgcgcgtttagatcggcgggcgacgtttagcg

SEQ ID NO: 10665 - DNA, 201 bp, synthetic construct
  misc_feature 1..201: note = Description of Artificial Sequence: Synthetic polynucleotide
  source 1..201: mol_type = other DNA
gggggttcggtttagggcgggaaatgggtggggaggggcggggtttgggttggagattggacggaggagtcgggcggagatgtaattggaggaagagggcgggacggggcggagaaggtttttcgtatcggcggagggagagggattaggagggggttgcggcgggggaggagagggggttttcggtttagagattgaggc

SEQ ID NO: 10666 - DNA, 201 bp, synthetic construct
  misc_feature 1..201: note = Description of Artificial Sequence: Synthetic polynucleotide
  source 1..201: mol_type = other DNA
gcgatttttgttttttttttgggtcgagcggtaggcgcgttcgtatcgttttcgttttttcgtcgtagtcgttgtcgatcggttggttgggttttgcggcgtgaggatttcggcggcgtcgtagtttcgcgagttatggtttagttcggcggggaggttcggttcgggtttaagacggcggtgtagattcgcgtcgttatt

SEQ ID NO: 10667 - DNA, 201 bp, synthetic construct
  misc_feature 1..201: note = Description of Artificial Sequence: Synthetic polynucleotide
  source 1..201: mol_type = other DNA
tttatgaatatttcggggcgcgggagttcgagcgttgtcggagggcgtttcgggggaggcggtcgttgatgtaagttcggcgggtcgttgggtttcgttcggttgcggcgggagtttcgggacgggtcggacgggtcggggtagaggaggcgaggcgagttcgcgggtggttagttataaagttcgggcggcgagatagac

SEQ ID NO: 10668 - DNA, 241 bp, synthetic construct
  misc_feature 1..241: note = Description of Artificial Sequence: Synthetic polynucleotide
  source 1..241: mol_type = other DNA
ttttatttttatatatttatattcggtcgtttttcgtttttttattcgtttgtcgcgcgcgcgcgcgatttcgtttatatatagcgcgcgcgacgtcggcggagatcgtttcgtttttttagatcgaacgtcgttcgttcgtttgttgaggagcggcgcgcgtttcggtttcgtttttttggcgtcgcggcgcggcgggcggggggcggcggtcggaggagttgggggtcgggttagcgcg

SEQ ID NO: 10669 - DNA, 201 bp, synthetic construct
  misc_feature 1..201: note = Description of Artificial Sequence: Synthetic polynucleotide
  source 1..201: mol_type = other DNA
ttttcgtcgttttttaggtttttagtgaggttttttagttggtcgtttattatggtttttattatgaacgttatggttttcgtcggtcggggtatcgggcgtttgttattacgcgttaggtatcgggtacgttcgcgtttattttagtattaggtttcgcggatagttttcgtcgcgggttcgcgttttacgtttggtatc

SEQ ID NO: 10670 - DNA, 201 bp, synthetic construct
  misc_feature 1..201: note = Description of Artificial Sequence: Synthetic polynucleotide
  source 1..201: mol_type = other DNA
gattcggtatgaggagttcggtatttttgttttttagttttttggaagtttttttttggattggtcggcgtcgttttttcgatatttgggggttgaggtcggtatttcgggtttgcgtggaggggcgagcgttaaggttgcgagagtcgggtttcgatttgtaattattttttttaatttttatggagtttcgtttcgcgt

SEQ ID NO: 10671 - DNA, 201 bp, synthetic construct
  misc_feature 1..201: note = Description of Artificial Sequence: Synthetic polynucleotide
  source 1..201: mol_type = other DNA
gcgttcggtagagagtttttagtcgtttcggatttcgcgtagtttcgtagagacgcgcgtgtcgttcgtacgggtcggtattcgggtcgttttcgtcggcgtgttaggatttcgtatagaagcgttcggacgcggacgtacgtagtcgcggttacgattttcgtcgttcgttcggttcgtgttcggttttggttagtaggg

SEQ ID NO: 10672 - DNA, 201 bp, synthetic construct
  misc_feature 1..201: note = Description of Artificial Sequence: Synthetic polynucleotide
  source 1..201: mol_type = other DNA
ttttttcggttttttttttatttttcgttttcggggtttttttttgttgagcgggggttgtcgggatttgggattgcggggttgtttcgatttcgtagtcgttcgcggtggaagttagttcgggtttggttttgagcgcgcggttggggcggtcgttgtttatggtgttggcgcgggtggcgcgtcggtcggcggggtttg

SEQ ID NO: 10673 - DNA, 201 bp, synthetic construct
  misc_feature 1..201: note = Description of Artificial Sequence: Synthetic polynucleotide
  source 1..201: mol_type = other DNA
tcgttcgcgtattggggttttcgaggtgtgatgttatttgttcgtagaatcggtttttttcgcgtcgtttttttcgcgtttttattttagtttttttttcgtcgttttcggggttaatatggtagcggcgtcgtcgttttattttcgtaatcgtacgattcggttggtagggtcgtcggttcggattttcgagatttatat

SEQ ID NO: 10674 - DNA, 201 bp, synthetic construct
  misc_feature 1..201: note = Description of Artificial Sequence: Synthetic polynucleotide
  source 1..201: mol_type = other DNA
tcgcgggcgcggtttttggaacggattttttttcgagtcgcgttcgtcgggtcgtttttttttcgttcgtagatttcggttcggtttcgtcgtcgcgcgcgttttttttcgttttggttttttttttttcgttttcgggtttcggcgttttcgttcggttcgagcgcgcggtttgtttcgttcggtttattatggcgcggt

SEQ ID NO: 10675 - DNA, 201 bp, synthetic construct
  misc_feature 1..201: note = Description of Artificial Sequence: Synthetic polynucleotide
  source 1..201: mol_type = other DNA
ggttaggttttttaggagtagttggggaatattcggcgattttggcggttgttttttggtggcgtagggagttcgcgtgtttgcgagtgcgtgtgtgtgcgaagtttttcgggtaagtgtgttagcgcgcgtttgggtgtgtgtaagggtgtgagcgtgtatacgtgggtacgggcgtgtgcgcgcgggggtgttcggttg

SEQ ID NO: 10676 - DNA, 201 bp, synthetic construct
  misc_feature 1..201: note = Description of Artificial Sequence: Synthetic polynucleotide
  source 1..201: mol_type = other DNA
tttcgtttttattcgttttttttatcgcgtcgttttttcgttttgttttgcgggtttaggcggaattcggaacggtcgtttttttttttcgtttttcgtcgtcgttttttttttttttttttcggttttttttttagtttcgggtcggagcggggtgtcggcggcggtcggttcgggcggcggcgtttggttatgtcgtgt

SEQ ID NO: 10677 - DNA, 201 bp, synthetic construct
  misc_feature 1..201: note = Description of Artificial Sequence: Synthetic polynucleotide
  source 1..201: mol_type = other DNA
ttaagttcgttgggcgttcgtttttgcgtatcgcgttcgtttttttcgtttgtgcgtttgggtttcggcgtacgtattgtatttgtcgttcgtttttgtcgtgtgtgtgtattgtcggggttcgttcgtttacgttcgcgcgtgcgtttttatttttatttcgtattcgcgtgtacgatttattcgtcgtcgttgtgcgcg

SEQ ID NO: 10678 - DNA, 201 bp, synthetic construct
  misc_feature 1..201: note = Description of Artificial Sequence: Synthetic polynucleotide
  source 1..201: mol_type = other DNA
tgtcgaatgaagttgagcgttttagtggaattagggattttaggggtgagcgatcgcgaggggagagcgacgaaaagggcggtcggagttggaggggcgcggagttaaataaaaaagggcggtcggagttgtaggggcgtcgagttaaatacgttatttttagatggggggttttaggcgagttgtttagtttttttgagg

SEQ ID NO: 10679 - DNA, 848 bp, Homo sapiens
  source 1..848: mol_type = unassigned DNA
acggggtcgcactcgagccggcggagcatccctagggagggggcgggaggcctcccctgcccagctccgagccggtggtgcagcgtccgcccccggtcgcgggcgcagactggcggccgcctccgggccacgtggtgcgcgcggcgggcgcgtccgaggagcctgcggctgctcctggctcacagcgctccgggcgaggagagcgggcggacgccgggggctgggccggtgcgggcggcgaggcaggcggacgaggcgcagagacagcggggcggccggggcgcggcagccggcggcgtcggggccgcggcctctgccttgccgctcccctcgcgtcggatccccgcgcccagggcgcacggtggagagggacgcggcggagccggccggcagccatggaaccggccccctccgccggcgccgagctgcagcccccgctcttcgccaacgcctcggacgcctaccctagcgcctgccccagcgctggcgccaatgcgtcggggccgccaggcgcgcggagcgcctcgtccctcgccctggcaatcgccatcaccgcgctctactcggccgtgtgcgccgtggggctgctgggcaacgtgcttgtcatgttcggcatcgtccggtgagtccgctgcgggccggcgccgcagggctggagcccggggtgagggtggggatcacgaacttgagaccccaagcccgttccctggactccccgcgcctccgcatttcctgcaggggcacctggggcccagcgagaggcgaggccacttacatcgaggggaacacaggaatgtgtgtcatcgtgtgtatgtgtgtgtgtggtgcgggggggggagtgcgccgcg

SEQ ID NO: 10680 - DNA, 1230 bp, Homo sapiens
  source 1..1230: mol_type = unassigned DNA
acgcagccccgagccccgagccccgccccgggggcctcatcccgccccttcgcgtccgcggctcgttttcccccactgagcgcccagctcccgcagtttccccggccgtcgagcgccgtgggcggggctccagggcggcggcgcctcgcggggagggtcctccgtgctgggggcgaggccacccgaggcagctccccgcccgcccccaaccccgccccgctctcggagcctataaagggaggcgacccgcggcccgcccggctggcatcccccagccgccgccagccccgccgaggggagccagcgccgtctctgaggggcgtccggcgccggagccatgaccctccgccgactcaggaagctgcagcagaaggaggaggcggcggccaccccggaccccgccgcccggactcccgactcggaagtcgcgcccgccgctccggtcccgaccccgggaccccctgccgcagccgccacccctgggcccccagcggacgagctgtacgcggcgctggaggactatcaccctgccgagctgtaccgcgcgctcgccgtgtccgggggcaccctgccccgccgaaaggtgcgtcccccgcccgccttcaggatctgctcagcccctctccgactccctacagggcctgctgactccgcagtgccctctcctcggcgtccgcggagtcccccaccttcttccccggcccgctgggtgcctcgactccccgcgttccccgctgctgcgaaggccgtggccctcgcctgcacaccgcgcccaggctcggtggctcttaactccgcgccccatgcacgccccctctctccctccttgactcctcccagcaccccccttctcctacccgctccatctggctttctgccccccatgccccgcctccccgtggccaggtgtcctgggtccccaggagcccctcgcccgagggacagagacagccccaggcaagttgaaggtccgagagcccccggtgggagaagcgggccggtggctgcgccgcgtgcgttctcactctgaggaagtgcgtggggagccgctgactccggatagcacacccttccgaggggactccccgattcctgggctgggggcctgccgcctggccccacgtctgacgtacggggcgcgagggccactgctccctggacttctgtcggaaccggacgcagtgggaggggtcgcagggcgcccgcggggcaggaaggatgcgggccgcg

SEQ ID NO: 10681 - DNA, 1094 bp, Homo sapiens
  source 1..1094: mol_type = unassigned DNA
gcggcgctaaaaatagctggggggagggtgcgggggcggcggagtctgtaacctaagccgccccagcctccggggggcagaccccgcggccgccggccggcgtccggccttcccagcacccggcccagggctggagctggctgcagggctggcccgcggcgacctgggcagggtggcggctgctccctctcctcccaccccgccccgaggcgcagcgcgcggcagagcggctcggtgcccggcgggcgggcggcccgggcgggcctgcggtcgggatgaggacggcgcctccgctgcagagcgctggggcggcgcgggccgggagctcgttggcggcggccggcgtggcgggcggagcgggcctcggagcggaggtgagtgcggatgcgccgcctgggcgcgcgcggtgcctggggaccccgggctggaacgcggggcgggggtgtcaccgggctgcgcgggggtctccggcccggctcccgctcctgcgccctcgggggccgctccccggcggggccggaccctcccagcgctcgcggcgcccggcccggctcccccgacctcctcctcccgggcccggacgtgcggggcagcgagcgccggggcccggcgggggccgcagccttgcccggagcggagcgttggcagcgcggggtccggctccgtgggcagtttgggaagcgcccgggcaacgtactggcgagggccgcggagcgaggggctcggggagcgggacctccgggcggggctgcggggagcggggcccgggccgccccattcatcgcggatcggagccgggggtgccccagccgtgccgccgcctcctccgggccgcccgcccgggcgtgctggccccgcggcgctccgagcgcggcataggcttgcgagtcggcggtgtcagcgccccggacgggggtgggagctttggagcccaccctgggggagaccacgccgcacccccgcccagccccgcgcacccccagaggcttttgcagagccgggaagttggctggacgtctagacccgtggggacgcggcgccccgcgtggcggcggccggaagggaaggccaatggggctcgggggactcccgcg

SEQ ID NO: 10682 - DNA, 1979 bp, Homo sapiens
  source 1..1979: mol_type = unassigned DNA
ccgccaccgccaccgctttcctcccagccaccccccacacccgcccgcctaccctccccctaacaccccccacacggctgcccgcattcctgcccctcctcggcctacgcgcgcctcctgcaaccccgacgcccccaggtccccagttcgccctccccctccggctcggagcccgagagccgcctgctctcatttcaaaacagcgataataatagggacgctgagaataacaactacgaccagcacggcgaaggcgcccctctcgcgggtcagaggtcggcgccccagctccgcagaacccggcgcccggccagcgccccctggcagcccctcccggcagcctcaggtccccaagacctgcaggcccgccccgaagccccccgtccgcccctcacggccgctccgagcccccgaggcccgccccggagccccctgtccgcctctcacggccgccccgggcccccacggcccccaggcccgccccggagcccccaatcggcccctcagagccgccgcgggcccccggccacccaggcccgcccggagcccccgtccgccccttacggccgacccaagctccgccgacctcccaggccccccccggagccccctatgggcccctcacggccaccccgggcccccaaagacccccggctgccccgaacccggacccgtaggcccgctccgggacccattattggtccctcacgatcgccccgggcccccaaagacccccgcccacccggccccgaccccccaggcccgcccggaggcccgcggcgcagctccgtcgccggggaaggcctgcaggccgcaaggccgcgcgaatgccccgtgcccgccccgaccaccgcccccagaccagcggcgcctctcaccgtgctccgagggctgcgcggctccgcgacggctcagcggcggggcgcgggcgctgcccatgcagcccgcggccgcgtttcccgggccgcgcggcccgagcggcaaggcggcggcggcggcggcgcgggctcgggcccggcagagctgcgagggacggcgggaggcgagcccgcccctcgggcgcgcccacggctcgggcgagagccgcggctcccggtgcggacgctactgatggggcgtctggccgcgggctcggcggcggcgcctccccggctggggccctcggtccatcgcgcaccgtctcagggcggcctctggctccaggacccagcggcggctgcggcgggagccggccgcatgagacgctcccgcccattggcccgccgtatccgccaccgccattggcccgccccggccggccgcaggggctgtgcacgtcacagcgccgtgagttagtgcgctaatggagtgaaggagagaggcgggattgacagcctctctggcggtccggaggcgggactaggaggacgtcccggtaacgattgggcagggtcctgcgtaagggcgcatgcgacactggaagtagcgagcaactggattggctgcctccgtcgcaaaggagggtgggtcttgcattctcgggcctgacgattggtctttccaagtgccggaagcaacagggatgtcgtctggaaacaaaatctggtattgaagcgcagggagacaaaacgtccacctctagagccgaggcggcggttgcctgtcgcgtgcccgtggtcttctgcctgcccccggacatctcgggccacgtccggcccggcctccggccgcgctgccctaacgggcgtcacggggcatgaagagctctgggcggctgcgaggggagggtaccggggcagcggggcggtcgctcggggctcccgcgcggtgactcttgctctgccgtcgaagagaacggccctcgggcgcgtcgcggccgcggctccagagcccctgggcctcgcgctctgagagcctgagccgcttgaggaggccaagcgcccacgaaccgcattccctgccttgctagttagttctccaacacgcgaaaaaggtagacg

SEQ ID NO: 10683 - DNA, 1930 bp, Homo sapiens
  source 1..1930: mol_type = unassigned DNA
ccgctcaggcagcgcgctgccccgggctccggtagggtggggactggtcgcgaaggctagagaaggcaatggcaggggaggtcagtccctgccgcgggccggctgcagagcggacgttccgccctgctcccggccccctcttcgcccgccgggttcgccgtgtcgaataactgctgtccggagctttcgtgacgcggagcttcaactgctgcgatccggaagaagcgaaaaggagtcccccccgccccgcaccctgagcgcccgggcgtgcaaacgtgggtggcggagagcggctgccctcccctcccctgtcccccctcccctcgcggcgctcccgtgtgtgcgggtgtgtgagtgcgtgtgtctccctcgctcactctcgcacacgttccggcactagtgcaggcggcgagccggcggctctccgctcgctcgctccggcagctgcgttcccgcctcgccccgccgccgccgccgccgccgccgccgccgcctctgcagtcgcagccgggcatggtgagtgagtgaggtccagccgccgcgcgctctcccggctcgccgccggaccccagcctcaaccggctccgtcccagggagccagcctgcggcgggagcgcgctgcggggccgggcggctgggggacccgggcggccgagctgcgcctggaggggcggcccgtgcgctctcggttccaggcgcgcagggccgcgggaccccgtcttgggagcgggctctacgcccctcccggctccgagtctctctcctcgagggctgcgcgcaccctccccgcccgcctgcccgcggttctcctcctgctcccggagcgccagtcgccccaccccgtgaccggctccccgtcttgtcccgcaggacccgcccggacgggaccacgccgccgccgccgccgccgccgcccggagccgcgcttcgggtcctgcctgagccgagccgcgcgcggggccgcagtcaccgccggcgggggatggggctgcccaggaggcgcgccgagcccgcagggggagcgcggagccggcgcgcagcctgagagcccgagcagcccgcgccgggccggtccgtgcgcaccgcgcgccgccgccgccactgccgcccgcgcctcgatggcgccatcgccccggagccgctgaccgctcagcgcctccagcccggcccgcgcggcgggtcctccgagcccggcccgccgggggagcggcctgccgcggaagcctccccgcgccctcccgcccggccccgccatggcgctgcggcgcctcctgctgctgctgctgctctcgctggagtccctggacctgctgcccagcgtccacggagcccgcggccgcgccgccaaccggaccctgagtgcaggcggcgctgccgtcgggggccggagggccgggggcgccctggcacggggcggccgcgagctgaacggcaccgcccgggcgcccggaatcccggaggcgggaagccggcgggggcagcccgcggcggctgtggcggcggcggccagcgcggccgtcacctacgagacgtgctggggctactacgacgtgagcggccagtacgacaaggagttcgagtgtaacaacagcgagagcggctacctgtactgctgcggtacctgctactaccgcttctgctgcaagaagcgccacgagaagctggaccagcgccagtgcaccaactaccagagcccggtgtgggtacagacgcccagcaccaaggtggtgtcgccggggcccgagaacaagtacgacccggagaaggacaagaccaacttcaccgtctacatcacctgcggggtgatcgccttcgtcatcgtggccggcgtcttcgccaaggtctcctacgacaaggcccaccgccctccacgggagatgaacatccacaggtgagagcgccgcgtgccgcgcgccccggtctccccgcg

SEQ ID NO: 10684 - DNA, 3177 bp, Homo sapiens
  source 1..3177: mol_type = unassigned DNA
tcgcgccagccccggggcctctatcctggcgggaagggcaggccgacccggcagactgcggcctctcgggagggaagaaggtgtcagacgcgcggagcaaccataaatagcccccctttcccagaagacggcacggggttcaagactcaggcgccgcatactcagaatgagagcagagactcccgccaggaaaaaaaggcacttaggggatctgctcattagcatgaaatgcaaatgagcccgcccggcctcatttacacaactctgtgcatggattcggcgaaagggcaaccagggagacgacggcgcagcagccactctgccacttcccccatcccctccccccatcggccggggcgggaactgagacgaccccaaccctctgcggtggcgggaggtgcgcgggggctgcgtgggtggtgcagccttaggagagtgaacaacgcccaggggtgatggcctcagcaaagtgaggggtggtgatggaggtcatccgacccatcccgccgcctctccgcagtggcgcaagcgccccaaaatctccggagagggaactgactgacccactaggttccgccgtgtctacctctcgcagatgttggggaagtgcttcccggcgtctaatcctcgctgttcccccctccaccggcgcccagcacacccgcggcgctccgctcccgggtacccacagctttctggagtggcgccggcggcaggagagagctagagccgactgagccccagaactcggggaggtaggcggggcaagggccggggtctgcgcgtgcgtgtgcacgcgtggaaagcacaaacccacgagggcccgctgccggtagggttaaggtgagtgagtgaaggcggcagacccgcgaagttccagttccgcggacactctttccctaagccacatagggacttaagagaaactgaggcacgaagttggggggtggcggtggtggggactttgaaggtcgagtcgataaagcccagctctgtgcttccgccccctcccacacactcgagacccccacaggttccttcttaggggtcctcgctctgctccgcagcccctcctggggatccgggctctgcggtccagcgcgacctgcctggggccacgtgttcaagcacgaagcccctgcgtggagtccacgcccttcaaaaggtccctaggggcaaagggatgaagcccaggagcgtcaatgtgaggtcaggtccagcgggttagggttacgaggtcagggtcgaagtctcagaattgactcgggagtatgaccaataagcccaagagatttgtggaggccacgcccagaccatgcctaccctagcctttctcgagctccgcccgtttctccaagactgggcccctccagcctgaagccccacccccaggacatccagctccgctccttccctcccccagtcccgcagccaagctcaactccagggtgggagattaaccaggtggagacctgggatttcgctctgggaccccctggtgacaaccctcacccccgtgccgcctgtctcctttcttccccaggcccgcccagagctgagctccgtcctccggctgctgcccaaatcaggggtcgtggacaaaggatgcctggggcctgcggccctacgccaggaccccgcgccgaatactctgattcttcgggctccctccaagggagtcccaaagaccccaatggccaataggaaagtgggttcggtctgggcagcagtctgattggctccagccttcgggagcggacccaggggcaaggggaggggagaggggcggtcctgggttttggggtgggaatcggattccagctgtggttctctccctgcgctcccgcccgcactgccacggcggacggccaatgggcgcgcggctcggggccggcggcgtccggcgattggctgcggggctgtctgggggcggggccgaggcttgaagttgaagtgagggatccagctgtggtgtgcgcggggctcctcgccgccgctttcgctcgctcgctccgcgtctcggccggaggaggaggctgtggcgccggcgacagctacggcagcggcagccaccgcggcggctgcggcggcggcatctccgcctccactcccgcccgggactgccccccactgtctccccgcccctcccggacagtgagcccgcggcggggcgggggaaggagccgcccccaccccctccaagcccacccctaaagagatccctcctcccctcccccgccgcctggcgcggagccgggacgatgctgaccccttagatccggctccagctgcgccgcgggaagagggggcgcccctccccggacccccgccctccgccgctgccccccttttcgttcgccctctcggggcggcttcgccgaaggtagcgccgaatccggcaaccggagcctgggcgcgaagcgaagaagccggaacaaagtgagggggagccggccggctggcccgggaagccccaggggcgcaggggaagcgggactcgcgccgggcggggtttccctgcgccccggcgccccgcgggcagcatgcccctgcgggcagggggagctgggctgaactggccctcccgggggctcagcttgcgccctagagcccaccagatgtgcccccgccggggcccccgggttgcgtgaggacacctcctctgaggggcgccgcttgcccctctccggatcgcccggggccccggctggccagaggatggacgaggaggaggatggagcgggcgccgaggagtcgggacagccccggagcttcatgcggctcaacgacctgtcgggggccgggggccggccggggccggggtcagcagaaaaggacccgggcagcgcggactccgaggcggaggggctgccgtacccggcgctggccccggtggttttcttctacttgagccaggacagccgcccgcggagctggtgtctccgcacggtctgtaacccatatccttcggggcacgacggccaggcgcggggtcagaagggggacgggccgcaccgccgggggtcgggggggaagaagacccaccgccaggtgagtcgaagtgagcccggagggtaggcggatggggggggggctgccagggaggggagggggcaccagagtgggagcggagacgcgagcaggtctcgtcggtaacccgggcttaccccacctgcg

SEQ ID NO: 10685 - DNA, 2195 bp, Homo sapiens
  source 1..2195: mol_type = unassigned DNA
ccgccagctccggccgctaagcaaacattccctccaggagtccgagaagccggtgtgcgaggggaggaaccagcctgaggtttatcgctccagcaactccgggtgattcatagagtttagactcccggttgtcgtagaccgcggcaggcacgcaaacaagcagcccgggagataccctcccctttcccagcccccgctcctccaccttgctaccccctagcccgtgaccagctgcctcccctccccctcgcgggcgctcagggttgagcaaacactccgggccgcccgccccgccaccagctggctccgaccggcgcaccgctggcgatcccccaggcaattcggcgtcatgagaaccggcaccccgagactcggcgccctgccctccctccgcgtctccagggccctggccaggcccaacaacctctccctcctctgtgcgcctcagcccctacgggcctctggcgcgggctaactaggcctcgctgcgggcccccaggactgcgcaccccaccccccgcgaggccagcagccccgggggaaggcggccggaaaatctcttgtttatcgggctggataagtaccagcctggattcgcttcccaatttctgcggtccagcttcagcagattcctggggccggaggggaaagggtggcaacccacagatccaccccggaacagggagtggggggtggggctggtgggaacctgacctcctggaaaggacggactcggagtcagagccaacgtgtcccggagcgcagaggcccagggggtcgcgctaaacactgtacctcggggaacaaaaccgtgaaggctaattaggacaagtcggagcagggaacggggacgccgggaggggagagcgcgctccgagttgggcagaacctggaacggtcacaggaaacccgggcgcggggtagtcgggccgagggggacctttgcccacggtccagagtggtctggactcggcccacgcgtgagaggagcgcttggtgacgatcccacgtacgcttggtgactggtggaggtcccagagaaggaccgtgcgtgcaaaaggcgaacctcggtgtgcggtgtgtccacgtgtgcaagctggggaggggagggggcgcagaaggcgtgacaaagacggactctgtcttgagtgtgcgcctcgctccggcccgctcccagcgaactgtgcctgaagtgtgtctcacgggagggccaggacgaaggtgacaaaggctaggtgtcccccacggagacgcgccaaggtagccccgcgcgtgtccgtaggcgcgctctctggaagacgcggtggggggtgcgcagggctgcaccctcacaccaattgccccggcgaaggccgagcccagaaagtgagtgcgcgtgagtgtgcgcgcgcccgcatgcgggggcgtggcagtcaacagcaacaacccacacgccggcagggccagaaactcccatctccctcaccagccggaaagtacgagtcggctcagcctggaggtgagtcggggcggggagggccgggcaggctttgttcctgtgtaaacggagcgcacgtacctggagcgcggcgggcgcccgattagcgccctgaatggaggtgatgtaacggtgatgcaggctccagcccaccctcgccgaaagcaaggagccctgcctggggacaggcccgcgcgagagcgagcaacccagcgcgcctggctcagcctcggtcccagggagaggcaggccctgcgtcccggcccgggccccgccatcccagccaggaccgggcctggcccagcgccccgcgccgcgtccctcccacccccgcccgccccccgcctggggctggagttggccccaaacgctgcgctggagcggggccggcggcgagtcccaggtaagggctgctgccttcccgctccgccgcccggaagagtcgggtcgggacggcggggagtgggcgagggcagaggcggggggactggacatcctgcgggctggggacgccgcgccaactccgctcggtcgctgaaagttttcaaacccgagccggctggggactgggggggtgggggagcccggcgctgcggctcgggctggagggaggggaaaccactccataatcggggtctccaagaggagcccctccaccgcctgcctctcggtgggagtccgcggtcactctctctcgtgggtggcgtcctctctgccg

SEQ ID NO: 10686 - DNA, 2063 bp, Homo sapiens
  source 1..2063: mol_type = unassigned DNA
tcgaggagccgtggaatggaggatcacggcggcgtacggagcaccggggaggaatcgtggggtgcgtaggcgccggagcgcccgggttcggcccggaccgaaggcttgcgcggtgaaggtgtggtgtctgtgctccggggaaagggctgtctccccgggggactgtttcgcagcgaggcttgttttgctcgcagctgggcgctccctggggagcgactgagcgcaagggcgggccgggaggcgcgaggcgagcacgatgctccagggccccaaggactcgtgtgcgtgtgcgtgtgcaaagtggggcggtgcagggcgtgtgcacggcacgggcgagacgcgcgccggtgcgggcgccgggcgccgccgggcgcaattacagcataaagcccgggcgccgcggggcgctggcccggagaacccaccggacgcgcagaaccggatcggcacccctcccgccagcaccctaacgcggagccacagcgcccagggaccggagggcaggcggcggcggtaaaggacaccacgcaagtctccacgtaacccccccgagcagtgcaagctcccaggactggcgcgcgtcccggccactcggagcgcgcaccgctcgcaccccggcgcgctccccgcgcggtgcagggaaccacagcgcgggcgggtattaaggggaaaggaggaggcgtggcctggccgaggagccaatgggccgggaggggcgcgcgggggaggagctcaggtgcagagtgccgattggccagttcgccctccggtatgcagatacggtgggagtcacgtgctaggggccgggacgacttcctgttggaggccaacgcggggcggggaagggggcgcgagcgccccgtctggctgaagcggggggaggggggttcttgtcagttagagcaacaagatggccgcggtggcagctccgcacctcagcgcgacggccccgggagccgtagccgccgccgccggccccgccgccgcgcagtcttgagcgccgcccgggccgccccctgacagggcagtcccagcgcccgccgcgctcccgccgccgtcaccgtcgcagtagccgcgggcccgcccgagccggaggcggagggagcggagcggccccgcgcccagccgtccgcagctgccaccgccgccgccgccgccgcctaggacccggaccccgccggagccgcatcccgccgggcgtgaggaggaggacgcgtcgcggcgttgccggggccggacctggacctgccgggacgcgccgccgcccactcgcccgcgccgccgccgcagccgccgccgccgcccgcgccgggacctgagtccgtggcgccggcgctgagcgggcccccgccgcccgcgcactcccgaggccctcgggcggttgttcgtgccgccgccgccgccaggcccgcgccaccggagccccgcggagccgccgccgccgccggggacggagcccaggtgagcgcggcagtccgcccgctcctcgccgcagccgcaactttgccgggaggttcgcgggccctttgttcggccgagccgagccggggcgggcgctggcccctagcgacccgcgtgcggcgccaggccccgggccggccgggtttgaggggagcggcgggaagcggccggggccggggcgcgtgtgtgctagtgtgagacggggctgtgcagacgcccggtgtgcatcacaatcaaacgggagtggaatggagggctgaagatggatgtgccccctcccttttaaaactcatgcagcggtgaaattcggtcctttccgggcagccccccgcagattttgcactggtgatggcaggcgcgaacccgccgtgttttggtgcaggagcccggtgccgttgtttgggggaagagaaaaacccggggcgtgctgcgggtgggcggagaaggacccctgggcgctctgcggctctgaaatcaggtggattttctaacggtgctgcggactgcggagtaatgcgtatgaggaaaacgagccgtacaacatctgtcctgttatcagataacgtaacccgagcgcctggttgccgcctctgctttaagcg

SEQ ID NO: 10687 - DNA, 816 bp, Homo sapiens
  source 1..816: mol_type = unassigned DNA
gcgcccggagtgggaggaggggaggcgttgcccgacgcgccctttcaagtctccgcgctcccccccggcggcggctgcccgggggcggtggctcggcgtcgcctcccccgaccgccccctccagggcccctcctccgtgccgcggccaggctgcccggccggcggcgcgctggaaatatgaagagacgctgcagctgcggtggcggtggcggccactgcagctcagagcggcgcacgcggcggccggggcgggacgcggggccgggcgcggagaagtcggggcgggcggcagagaggccgggacgcggaccgggccggggcgcccacagccgcccgacggcgcccagagagcgcgcgccccgcagccccgcgcctagcccgccgggcatggggcgcgcggcagccgcctgaagccccggcctggcccggccgcacccggccggaggcggagggcagagcgcgcgcccagttgcccgggcaccaaatcggagcgcggcgtgcgggaggccccagagcaggactggaaatgtcctggccgcgccgcctcctgctcagatacctgttcccggccctcctgcttcacggtgagttcccgagggccactcgagcgctcccagccggcggaggcagcccgggcgccgcggagcccgcggaggcgtcgggtctggatcgcggcacggcctacactgtccccttggcggggcgggtccgaggggagccccgcgcctgccgtctcagccctgggagagggggctctgcccactttccgaggcttgggaccgctctcccccagggcgcccggagctctttgctgcg

SEQ ID NO: 10688 - DNA, 368 bp, Homo sapiens
  source 1..368: mol_type = unassigned DNA
ccgttttctccacacaggcgcgccgggaggcttcgctctttggccgcgcgactcgggcactcacgttccgcgcagcgtcgcggtcggctccgcgcagcagcatcacccgcaccacctcgctgtggcccatctgggacgcgatccacaggggcgctgtcccgtcctgcgggaagaggaggcggcggccgccgtgactggggcgcccggccccacccgctcacagaacgtctttaacaccaggggtctgaaagcgaaaactccgggaaggcactccctgaccgcagatcacactctgcagctgatccacaccgcccaggaggcagtgagaaaagagggggtgtgtgtagcccacggacgcagacggcacg

SEQ ID NO: 10689 - DNA, 1411 bp, Homo sapiens
  source 1..1411: mol_type = unassigned DNA
gcgggctcccactccgccgttaggagcctttcccacaactctgagaaccggggtgcgaagaaagaaagggcgaaagggccgctcaactcccagagagtagccagcgaaagactcgaggggccccctcccgcaggaccccgaacaactgcagcacctcctcagcccgcggggtccaccaaggagaccctcacaaacaatagcatctgcggcgaaggaaccacccccgcaaagggcagaagcgccagatcctaccagccaattacccagacgcgcatcgcgacccgcaagttcgggcacgctccgcccgggcgcaggcagcgggaggggccgggcacgcccgtgggggtggtctgggtacgggtctgatccgggggcgcgctcgggaggggtctgggtctgagccgggggcgcgcccgggggagtgggctgggtctggggcgggggcgcgtccggaggtgggggagtctggggtgggggcgcgcccgtgggggtggggtggggtgtctggcccggggacgcgcccggggaggcgtggtctgggtctgggccgggggagagccgggtgcgtgctctgggtctgcgcgggggagcgcgcctggtgcctagatgtttggtaccgagcgggtgggggacgccgggctcggagccggcggcaagtctcctcctggcaggtaacaagcctcctttgcagccttgaaggcgccttggccagggccatcccacggcccgggcccccagagcccccccacggccccgaatccgagcagcccctggccctcaactcgccccggaaaggccgccctcccctccaatgtgtggcgcgccccgatcgcctctcactcgtggaacaaaagagcagctcccgcggagcgggtccagagtctgcccggactgtccgatggccctcggccctctgagcgccgcggctgccgggctttgtgtccgcgcggggggcgggaaggacggccggggtccccagtgcgcgtcccgcggagcggcgcgcggcgcccgaactggaaagttgtcgccggcgcctgtcgcctccacgccgccccagtccccctccgcggggcgccccattcattagccaggagactgggcgcagggccgccggggcgggcggggggcttaccttgctcttgacttccactgcgctgcaatcgtagaatcgcaaggtctgagacttgtgaaaacttcggttcatggtttcggccccggtcagcctcgccgtcgccctcgctcctcaggggccgcagaaagactcccgggggcggcgcccccaggccccggccccggccccggcccgcgctcgcttggccggcgggctgctcccggtgctgcgggcccgagctgggctggccgcgcgcctcagggactccaggggccgcgcgcgggaggagcgcgggggacg

SEQ ID NO: 10690 - DNA, 1487 bp, Homo sapiens
  source 1..1487: mol_type = unassigned DNA
ccgcccctgcacctcggggacgtgaccccccccccaggctgacccgttcctcgctctgtcgtccccaggtggaggaggagctgacgcacctccagaagaaactaaaagggacagaggacgagctggataaatattccgaggacctgaaggacgcgcaggagaagctggagctcacggagaagaaggcctccgacgtacgtgtgcagggatgcgggagcccgcggcggggccaggccggagccccggggccgggaaggcggggagagccgcagggggaggaggaagaggaggaggagaaggcggcgcctcccagcgctttctccaaataagtcccgaaaaggggcactttccagcagctgtggccagcggtgccgacgtcaggccctcccccagcggtgctgacgtcggcggtccggccgggtgacctcatcgccccgacggcagccggcccggggggcggggagaggcgggggcggcccccgcgcaggcaaaggcttggggggccggggcgcggctgtgcagctctcgccggagccgagcccagccgagcgtccgccgctgcccgtgcgcctctgcgcctccgcgccatggccggcctcaactccctggaggcggtgaaacgcaagatccaggccctgcagcagcaggcggacgaggcggaagaccgcgcgcagggcctgcagcgggagctggacggcgagcgcgagcggcgcgagaaagtgagcgccccggcctcgggccccgcacccgcagcctcctcccccgcgcgccctcctttcttcccggcttcccgcgctgcccgcccgcgcgcagtcctcgggccgcctttttacgccctcggacgccgatcgccgacccacatccctgcgcccgcagccaggaccccctacttcctccgccgtcctccttcctgggcctgggacaggggagggggcgccgcctccgggtcgggcggggccggccaagcgggaaatggggggatggggcggagggggtgagcgatctccgggtggagaagtggagcggcgggagggggcgtatcgtgcaggctccgactccggggctggcgccggggtcccgggccgaggggaacccgcgaccggacttgtgggggagaatgaggatgaaaacgtggagcttccattgtctagggtttgaccggccgacagggatttcgacgggggaccggggatctggggagggggtcgcactttctcgcctctttcgcggcttcccggcttctgcttgcttccctgaccgttcccaggggcgcggcggcgacgtgtctgctccaggcggcgggggggatggggggtggaggaagttcagccccaagccgcccgcctttctccagctgattcctgcgggaaccggggcggcgggaccctgcctctctccagaaggccccgggaacgctggcgcggggccctgaacccacgatcgtttgagcgcctgctgtgcgcctccgccgcgagtcgcagggcccg

SEQ ID NO: 10691 - DNA, 602 bp, Homo sapiens
  source 1..602: mol_type = unassigned DNA
ccgcccggccaagctatcttctcgctagcaggtgaggcccgtgaacagccaagctccccttggcacggcggaaccgcagtggacgcgtggaggggctccgtagaggagggacctttgcttgggatgcggggagctgtagtctcttatctgcacccagcttgttagttgtacgcctgcaggactacaatctcagcacaaagcaggattgtagggcggtgcggatccctggagggagacagcgcggtgcgctcctgccggccatgctggctggggtggtgtcttaggcggttccagccgttagtcacagggcggccggactacaatcccagcatacaacgggagtggaggtggtgaccttgagagagggcctgtgctgtgcgcgcctcgcggggcatgctgggagcagtagcatcttagctgcttccggccgctggtcgcagggctgcgggactacaatcttcgcatgaaatggaagagagggtggtgcggatagcttgaggaaggtacggataccttgagggaggtatggatacgttgagggaggtacggatacgttgagggaggttacggatacgttaagggaggtacagcagcggtgcgcg

SEQ ID NO: 10692 - DNA, 628 bp, Homo sapiens
  source 1..628: mol_type = unassigned DNA
ccggcatccgccgtattacagcggatgggtgcatgcgggcggtgacccgagctcgcgcgggctgcggaaccctccactcaccaacgccggcgccgccatgggcccagggggctgggtgaggccgtgagagtcggcgaggaagccggtcctgcgggctcggccgaccccgggctccggctctgggctgcgagggacctcagtccccgccgtcgtgtaaaatgcacacaaggttcgcggcgccgcctctgcgcgccgtgaggacacagggctgtcgccaaggccccaggaagggttttgcagacgcttgtgggggtgggatcgcggctgacataaaagcgtgtaagtgggtcctatcctcctcactgtccgtctctactcggtctcgaaaagtggcccctgtctggcgttctacccagtgtagcgttggcaaccacagcagccgcaacctaacggcggacgaagactggacgccggaagtcccgcccacgccgctacgggaacgcccctctgcgccttccgtctatggcttggggtcggcttccgtcccttgtagcactgccttctgggtaatgtagtttgacggaatccgggtggtacctggagcgcactttctgttctcggtgaggcg

SEQ ID NO: 10693 - DNA, 215 bp, Homo sapiens
  source 1..215: mol_type = unassigned DNA
acggagggacgggccgtgcagtgcagccggcggggccagggccaggccgagggcgcgaggtggcagccggcccggggaggcggaggctgagcgagcggtggtgtttgtggagctgtcggctgcggtggaattatgaaaaatagcaggcatcggagccggccttcagcttcgattaggggagatgggacatgacaggtgcgatcaatacgcagccg

SEQ ID NO: 10694 - DNA, 2638 bp, Homo sapiens; identical to SEQ ID NO: 5191
  source 1..2638: mol_type = unassigned DNA

SEQ ID NO: 10695 - DNA, 2172 bp, Homo sapiens
  source 1..2172: mol_type = unassigned DNA
acgggatgccggtctcggccgcccccaccaattgatccatgatcggcttggccagggcgcccggcagcgagagcgccgccgcgccgttgggaggcagcgtcagcgcggggaagaacggcggctggtgacccagcaccgcgctcatggcgaagtccggcgcccggtgaggtaggaacggatggtaggccatgcttgtcccaggaatgaccggatctctcatggagaggctcatccactccaggcggggcgctgggctccagccggggacaagtccgcagctgctgtgttttgttgtttttttgttgttgtttaacagcagcacataattcaaaaggggggaaaaagcaaaacaaaaaagaaagaaaaaagaaaaggaggcagaaatcacaactaatgcacttcaaagggaggaggggaagtgtcttttggagaatgggaggccgcttttaaagagggcaaggcgaaaaatcagcaaacatagtcgcgcgggtgaccgtccttgtgccttgcgtttttaaaaagccgctcctgaacgtcggtttcagaagcgagaggagcgagcagggtctcgactcgcgcccgagccctgccgctgagctcgaaatagacactccagccctgcgtcccaggaatctctctccagcccctaggtcttttgttgcaaatgtgaaaggttctcctagaagactttttacctttctttttcttcttcccccgccccctatctgtcttcctctccctctttctcgctggtggcgtctgcagctgtgctagacccggctttaacagggagcgagagagcggaaaaagtctctctcctttaaaaaaaaaaaaatctgatttaaacccccttctaccagcgctatcaaaacttgaattgcaaactggcttccgttcgccgccctcctcctccttcctctgctccgagcctccggagggtgtctcggtttcaatccaaatcttgctgggctcttctcccgtgcctctctctcttccttgtcctaaaacgtgagcgaattcgcttcctaaatctgtgtccaggcgcgcagggcagggaggatttagagggggaaaaaatggaacagagggaaagagagggaggggagagagagagagagagagagagacggagtcggagagggagggagcgagagaaagcgagagctcctcgccaccctccgccgcctctagaattcaccgggcgtctgctcggcggctctagaaggtcgggctgcgctgtgggctgcggggagccggaggcctcttgattggctctttgacgctttcggaccaattgtgttgctgcataggcgtggttttcacaggtcgagtgctgggggatagagctgagttataaaaagaaggtgtcggaaactgtaacgtcgcagcgccgcatcggtactactgcctgtcctgtgaatatgtcaacatgatcagagggcgggcgggagccactggggagcgcgcgcgcacagagtcgcctctaggtggcttatcgagagatcgctgcagcccctgagctcgctcgctcgctctggttcagcccacgtctgaaatgcctcagtcatccagccggggatcgagggaggaggcagggccaaggaggaagggggagggagagagggagggagccagcgagcaggcgagccgggcggggaaggcggagagcgcgcccgggcgccgggcaggggcgctcgcctctcttgcactccgctcgcctctccgaccgccgcggccggttctctctccagctctccttcttctccccgccccgggcgagccgggcgggtggccgagcctccccgcgagctgccatccggccactcggttctacaaaagccggcggcagccgagaagcgagcgccgagactccaggcttgcgtgctctccagccccacgtggagccaagctccgcccggccgccgctgaagggctcccgagctcgggtgtctcggtgctggtctcccctgcgtctgggctgggggagcacaaggatgcggccatatctcagcacacgcatgtgtgggcttcctctccactgcgccccacccgcagccatgtgcgggtacccaaacacccccggtgtatctgtactcgaacacgcgccaacacactgggactgaaacacacaccgaaaaacacgtacacacaaacacgtacacagcctgcgcg

SEQ ID NO: 10696 - DNA, 2548 bp, Homo sapiens
  source 1..2548: mol_type = unassigned DNA
ccgggtgggcctcgaaggcgaggatggccagaacatgtccctcgtgacaccccttgcccctttctagggccgtgcggcgagaggcgtccgagcactgccaatgtgacgcgggcccacggccgcatcgtggggggcagcgcggcgccgcccggggcctggccctggctggtgaggctgcagctcggcgggcagcctctgtgcggcggcgtcctggtagcggcctcctgggtgctcacggcagcgcactgctttgtagggtaagtaggacccccaggccttgcccagctggggtccccggcgctgggccccgcacctgccgggttgtccggcgggcgacgcgcgggaaaggtggtctctgctgccccctggcggcggccggccccgggcttccccatctcaaggcgccgcgcccgccccgccaggatgccagcccggagggggtggcacggccgggcgagttcgccccctctgggacgggacccctccccggcccgccctccgtgcccccaggtggagaaagcccggcatgcgggcggaggggcagggtctccgaggggcctgcggggtgtgcccctgtccttcctgcgtctcagctgccgctcgacccgcagcgccccgaatgagcttctgtggactgtgacgctggcagaggggtcccggggggagcaagcggaggaggtgccagtgaaccgcatcctgccccaccccaaggtgagaaggcagtccccaggcccccaaggctgggcaccgcacccccacccgtgcttccttgaccctgcgccgcctccccctcctcagtttgacccgcggaccttccacaacgacctggccctggtgcagctgtggacgccggtgagcccggggggatcggcgcgccccgtgtgcctgccccaggagccccaggagccccctgccggaaccgcctgcgccatcgcgggctggggcgccctcttcgaaggtactgggcgtgggtgagccggcgcgtggtgggaagaactgggggtccgaggtaatagagtgtagggaggccgggttgccttggaaaaatgctgcctgctctttcaaagggggaggaatcaaggggggtggtgggaaggggaccctcaaggcggggctcttgccctccaaacctgagccttccaccccttccctgcagacgggcctgaggctgaagcagtgagagaggcccgtgttcccctgctcagcaccgacacctgccgaagagccctggggcccgggctgcgccccagcaccatgctctgcgccgggtacctggcggggggcgttgactcgtgccaggtatgaacccagtctgatgagaaaaggccggctgagccttcccagggccactacggcctcttttccttccacgtctgtctgtcactcgacttctctgagcctctctgtcctcatccctaaaatggacacaagtggcaagctcacacctgccaggcgtaaggcaggcgtcatagggggcaggtgaatgcagcgtcctctctcttggccccgcagggtgactcgggaggccccctgacctgttctgagcctggcccccgccctagagaggtcctgttcggagtcacctcctggggggacggctgcggggagccagggaagcccggggtctacacccgcgtggcagtgttcaaggactggctccaggagcagatgagcggtgagcgccctctttccaatgccccgtccccagtgccccaacggacaaccgtgggacaagcccgtttccacccggcccatgcccattcccagctcccttctgcctcgggaaagcctgtctccttccggggaaggagtgagggggctagggccccaaacagagggtgagctgacccctgtcccgcccgcagcagcctcctccagccgcgagcccagctgcagggagcttctggcctgggaccccccccaggagctgcaggcagacgccgcccggctctgcgccttctatgcccgcctgtgcccggggtcccagggcgcctgtgcgcgcctggcgcaccagcagtgcctgcagcgccggcggcgatgcggtcagttctgttcacccggacccggacggggggcagaggggagggggcctggccagcctctgaccgccgctccgactcctgtccggtccgcagagctgcgctcgctggcgcacacgctgctgggcctgctgcggaacgcgcaggagctgctcgggcctcgtccgggactgcggcgcctggcccccgccctggctctccccgctccagcgctcagggagtctcctctgcaccccgcccgggagctgcggcttcactcaggtaccccgcgccctccagcccagcccagccctggcccggccccacccgcgcggcacagccactttctccgccgaggcggtaccctaaccctgtgcctccccaggatcgcgggctgcaggcactcggttcccgaagcggaggccggagccgcgcggagaagccaacggtaatgacgccccctgccgaccttcaggaggggataggctgagggcctggacgaggtcggaagcgcttctactgcagctccg

SEQ ID NO: 10697 - DNA, 919 bp, Homo sapiens
  source 1..919: mol_type = unassigned DNA
acgggagccgctgcagggtcaggacgcaaagactccgaggcccttcaggccgaggggacgtcgccctcgccccacccctgcgcccggcaggcccctggtctcgctagcacctgtcgttcagggctggacccacgcggcgggcgggtgaggggtccctggcgcgcggccaccgctcgctctgtgccaggtgcggtgcggcagcgggagcgcgcggagcccgaaccctgtacgtgtggccccgccgggccggtcgctgcgagcctcgccccggtctcggccaccgccggggaggacgacgacgacgtggtgggggacgtgctggcactgctggccgcgcccctggccccggggccgcgggcgccgcgcgtggaggccgctttcctctgccgcctgcgccgggacgcgttggtggagcggcgcgcgctgcacgagcttggcgtctactacctggtgagtgccggcgcgcgggagggcgggtgagtccggccgggcgggagccggggtgaccatccgtgcccctcgcagcccgacgccgagggtgccttccgccgcggcccgggcctgaacttgaccagcggccagtacagggcgcccgtggctggcttctacgctctcgccgccacgctgcacgtgggtgaggcccggggcgtgggaggatcgcccgctctgtcgcccaccccgccgcccgcccgcttgaccacgtcccaccctcccccgcagcgctcggggagccgccgaggagggggccgccgcgcccccgggaccacctgcgcctgctcatctgcatccagtcccggtgccagcgcaacgcgtgagtgtaccccggcccggaccccacacccgcattcgctcggcctccacaagctggaggtggttaaacaggcactggacggggcttccgcccgttcacaccccaccg

SEQ ID NO: 10698 - DNA, 2488 bp, Homo sapiens
  source 1..2488: mol_type = unassigned DNA
gcgcagcccggtaggggcggccggactcgggcaaacgcagctccgggtgggagcagggtcacttctgctcccgagcggctggaataaaaatgcggattgcactcccccctcctccctatccaaagtgtccagccttgaagacaaggtggagggaggagagagagggcggaggtgtaaatccaacttaacccctgcgcgcgccctcgaggcggccggctgcccccgccccgccgtgtcccctcattaaggaaggccccttcgccaggggccgccaacgcccgcggcttccggtcagacggtgcacctgagagggacaccccgtcccctcccgggagggacccgggcctgctgaagtgggctcaactctgcaaaccgcgtctcaactccccgcgccgcgccggggaacccctccctgacactcaacgcttcccgtcctcacatccccaaacacagtccacttcccttctcgtggcggccgcggcaacccgagcccggcccccgccccgccgccagagaacgcctccctcgccgggacgcggtgccgagcccgctgcacaccgagcggccgtggcacaataccgcggcgctgcgcgcacaatcaccgccccccaggacccgcggcgcgcaccccgggagtggggtgcgccccgcgaccctgggcgctcagggccagacacacctcttgggcgccccgcggcccccacagtgcagccttcatcgccccccctccactctcgggcacactcacccgccccccgccccagcccactcggcccagggcgcagccgctcccccgcgccccctccctcagccccggcaaaggaagctccccctgcgcccccctccccagaaccgcccccagcccctcgcccccctaaccgcagctcaacggccggcggcagcagccggagaaggggggcggcggcccgggccccggaaacggcccgatcgccgggatccgggccggactccgtacctgggctggaagcgaggcggagatgggcggtcgggatccgcgagtgagcggggcgggcggcggtgacagccccacagctccagctgctgctgctgctgctgccgccgcggctgcccggggagaggggctggcaccaccgcggcgcgtcactgcccggcccgggggcgggggtggccaggaggagggcccaggcgagcagcggcggcagcggcggcggcgccgcggcccggaggaagggggagggggcaccgggcacggggaggcgggagagggggcgggaccgggcacggggcgggggcgggggggaggggagcgcagggagggcgcaggcagggggagtaggaggagcagcaggaggaggtggcggaggggcgggtgagagggaggagtgggcacggggggaaggggagagaggaaaaggaggcacccagggagaggggagaggagaaaggagggagagaggcgcggggggagaagaggaggaaggagggggagctgggccaggtagggggggataagggcgcgctggacgcgccgccgtgcgcttcggtggggagcgcgctcttaagggggaagcgcttcgaggaagatccttgcacggggctgagcccggaaagaaggcgctgggatctgtgcctacccatcgctcccggaggctgcggtctctgggtccggtgggggctggggggagagggcacccggcgggctgtctgcggtcaggccaggagagggagacttggcccaaataaagtgactcaggcaccctcaggaactctcggcgcccggggccccttcgggcagccttcgacccccatgcgtctttcgggtccccagggacgcgggtacttgtggggcggggctgccgggcctcggggttcggctcccccgggcggccggagcgagaccccgggctgggaaagccaggcacgtggccggctctcggccgtacccccgccccacccccacggcagggcccccagtgcttgatcaagttcaagctcgagctcctcggcgcgctgcccaccggctgcccctccgcgcccctcccccttccccatccgcaccgtctcgctcttcactcttcctttgtctctttcccaccacttagtttacaccccctccgccctcctccccgccccccgcgggcacccgagtgtccgggaggcgctcacctgttcgacccaaacatctacgcgacccccagcgcccgccgcccgcgtgcccgcccccgccccgccgccggtcattgtgctccgccagcccacaccgggccgggtcctgacggcgcgcgagccacagttgtaaagtaataggataatctcggggacgtcgctccagcccagacccgggcacgcactgtccgtggagacggcaccgccggggaggggagccacgcggattccagatgcggtcccccaggcggacagacccttgcccggggcgcaggaggaggcaggactggcatcgcggggtgggagccctggacctccgagcaacctcggactcggcccg

SEQ ID NO: 10699 - DNA, 513 bp, Homo sapiens
  source 1..513: mol_type = unassigned DNA
acgttgccacggcaacgactgcacgcgcattcttggagggtggcttgcggtctcataggcctcgcgcccggggaggagaggaggtggccgaccagaccgtgggctcccgggtctcccggctccctcaggtcctaaatctctcccattagagattctgcctggagcccccatgttagcgttctccttcatcggctctcctccccacgccggcttcagtgcaccacgcggctcggcgagggactgggaacgggatagggacgcgccccaactcactcagcggtggagctggggggcggcgcggtcacgtgggatggcgggcagctcaggggatccgggcgacggggtctggcgggcagggttgttccagccgcctttataaagccggcctccccgacccctcctcctctctgcagctctcccctcctcccttgggggctgggaggggacggggcgggacgctggcagccgggagagtggaaaaggctgcacagagccccgtgacaagcccggccg

SEQ ID NO: 10700 - DNA, 1766 bp, Homo sapiens
  source 1..1766: mol_type = unassigned DNA
gcggatggccggcccaggcgcgctcccctacccggggccgcctgtgctcggtgtgccgtgtccgcgggtcaggggcgcggcgggaagtcctcgcccgcccgccagccagcggggtcaaacaggtcatccctctgcggacggccggcgccggagcctccctcccgcccgcccggacccacctccgcaagcagcgctggggctggagccgggcggtccggaccagccccggctcacctgggcggcgctcgcggccgggctcacgccggggaaggctccggccgccgcgagcccccgcccgagccccgcgtcccccagccacccacctgccccccacgccccactcaccagcgcgcacggccccggcaacctcacccggagcggggcgccgccgccgcctctgccgcagcccggccgggccgctgggcgcaggggactccgcgccgccgctgccgctgccgccgccgccgccgccgctgccgctgctgcatcccccggcgagcgctgctgctcctcctcctgcctcctccccgccccccaacgccgccgccaccgcccccggccccctccccgcgcgccgccccagccaaagtccggctccgcaccccgcccggaccgctcttaaatcgccccagcccggccggccacgctgccccagccagccccttggcacggcgctaccgccccccgctcgcctgcccgccggcctccacgcaggggaggcgggcgcgctccggggcggggagcgtcgggccgggagccgcggacggctggggcccggggcgcggggggcccagccgcggtgccctcctcgagccctccgcgcgctagcgcttttacctccggcctgggggacgcgcggcccgcgacccggccctgcctgtccccggcgcacggccccggccccggccccgaagtccagctccggacggggcagtgaacgcagagctggggtcccggcggctctcgacctcccgatgcctccggactcggctggccgcgctcccggcgccgagcgcgcaccctcgccgggacacacagacgcacactcactcgacacactctcgctcctgctcgccctcggcggagagttgaaacagatgtgggattcgcccaggagctggaaacgagggagggaagcgagccagagccttgtgtgcacgtgtgtgtgcgtaacacacaaaccagggggcatcgctaataaatcaaatatcgtgataaattcaggagggccatcgatcaggtccacttggctggaaacgacgtgaatctgcctcttttccgctttcttcttctcctctctcggagctggagggagccaaatgttccgcggggagtgcgacagccccggccgggcgctcccctcgtaatgacacgttaataaatgttttcttttatctgctttcacaggactcgccccggtctgcaaacactcgactgcctttgccgaaagcctcgcgctcgcctccagccacacacatttgccattggagaggccggcgccggccgcgacccgcagctcaatcgcagggcaaaccgagctgcctgtgcgcgcccgagaactccccgagaaattaacttcggctcaagtgaaaatagcagctgttgtccagaaatggcccgggagtagcatagaaaggagaaaccggcttcctccgaaaggggaggaattggactcaagggggtgctgtctaccgtggtttccgctgtccctcgcgccacagaagaggccggagggggaccggcctgacgcgggtgggcaaagagcg

SEQ ID NO: 10701 - DNA, 6511 bp, Homo sapiens
  source 1..6511: mol_type = unassigned DNA
gcgaccccgggggctagcagagaggagaggctgcgggaggactcgctgcgaagggcgaggggtggcgctgggtgggacgggcgcctggggccgtgcagggtggctcctgggtgctgcccgggctgcctgtcgcccagtactggcgcaggaagacgggtccgcgcagcgtctggcaacagtggcctgctccacgcctggaggcgaccaagttctgagttaaaggcgccgggcttagccgggaagtgtatggcgacccagaacacggagcggagaaggcctcaggggacacgaggctaccgccttagtcctcgggcctgcgctccgagcggttagggtgcgtacggatgggctccgggatgttagtggagaggtgacaggagtctaccatcccacggccaagcgtgtgaggcctccggcgggcgggggtcccccccggggcagggcagggggagagtcaggcatgtctctaacgggctccctagtagaaccgctaggaaagtggccttcaaccctaggcacctttgtggctttcaggtagttgggcgactaaaaattcacttttgcctgctgtgaaatgggacaggtggttgtcaggttagagactgtgcccacgaagtctcgtttggcgggccgggactgacgtggacccgggccctcctcggaagcttgggaacctgtgagcccctcagctcctcgcctcactttgcctgtttgaaaaaaggagttgtttgagaggaagagttaaggctcaaaaggttctaaacgaagagcatgcggcctgacgcggagcgcaaagaagcgagcagtgaactgaatctggtgggactgagaccagaggcgtctgtatgcggcggccgcttcgcgccctattaaagcaatctgttatttacgataatcatttttgtaattattttggagtggctgtgacttgatgtctgtggtgccccagggcatgcccttactggacatagatacttcagggtgccctttgacgccagtgtcggtccagtgggtgccagtgccgcgaagggagggtggcgggcgtgaatgccccctcctcctgggtttgccgcaggccccggcctttccaccttgcttgatcctggcgggtctgccacttactgaggtccctaccggcgctcacgttgtcccgagaggcgggacaaacgtccggcgcgtggcgcggagtctgcgaaagcgctcgggggcctccatcttctgctcgggagtcccctccctggggcgggaagaggagtcgcagatctgcccgaatcttgctctacccgcctggccgccttcttccgtctggggtgggggcaggggtggcggatgactcaggcctggggccgggagccctgtttccaaaggcaccacctcgcgcctctttggaagtggcgcgctgttggggcgctcccgctgttgcagaggcctggtttgcggtttcataggggcgtgggtccagggcttccagggagtaagtgagtttaggctccctagggggcggtagaggggaacccccgacaaccttccatcctcttctccaggcggctgcgaggcctccggggttccagaggggtccccttctgccggtgccggctgtcttgagcgcggccacgcagtccgcgtcttcacgtgggcaaggggcggggacgttggagggaggctgtcttggatgctggagccttcggttcccggctctgctgagcagaaaagttgaagtcaaggaagggttgaggcttcctcacaagggcgcgcgcgtgcctgggtgccggcccagaagccgagaatgtgcgtattggggaagggtctcccgtgccgagaagacagaggatttgttctagctgccttccgtacagagggcgcggaggttgcgctccagttcgaacgcttacccattggaaagagggcagcgccggggtccagggaagctccttgggaatgaatggcctttgccaagcggttccggatcctctgggtcctttgggcccacggcacggtgctgcgcgagccctcagtgcccatcggctcccttcgcctcctgcgtagacgctcccaggcggggaggcatatcggttcctccgggcagctttggctagtgttgctgtgggaaaggagagccagggcctgggatgggggatgagcaccttcttgcccattccgggccccagcgtgcaggaggtaaacttgccagcacagacaagacagcttgttcaagctgcacctcaggccgggtcagagaataaaaccgagggctagaaggcccagaatgtcggacagcccagcggcacccgtcagggagtcccaggcgcccgaaagaggcgccgcacctctggcgagtctaggacccatcttcctggacctgtgctctggagtgcctgcgggcctgggtctaatttctgcttctggcaggtgtccccctcccccgccgctaataccaggagcgctgcttctgcggtaacttattttacccccagaagcctgttttgggaccgaagtgtcagggtcctgtgtgtctttttatgcactgttctccttagtgcaaagccctgcagatatgcttggccgaaaagtctcagtggtttcaacttccagattttgttcccgcgtccggtcggaaaatcacctgggatttggctgctgtctaaggccgggggaaagtttcccttggaggacgcctattattattattttcttttaggcccacctgggtctaaataaatgctaaagttcaaacgaacccgagaaggaacagcgaggcagtggatgccgccattccgtggatgggagagtcatgtctactgcaggtgcggacaccgtactgataggcattgattattgcaaaatcgtattcagtatcaaatagaaatagtcttgtcctctaatccccacagaatgtttaaatccagcccagggagccagttggggcgtcccaacaaatacgccctcgagaattagcgatgttccccttacaatgaaagtcaattgctgcataataactgggccaaagaatttcgttagtttaaattttaaaaattagtattgcactttgctttcaagtttgggtggcaagtaccgaaggggagagggaagcagcgtttgtgtggaaggaagtttcgttttctgtctaaacatgtgggacctgggtgtctacctctccagtcgagagctctctgcaggctctctcccaacttcctgcacctcctcaccctcaccttacccgtggcgctcgggttttattcctgcccggcgcttctttcccagggcgagtagaggcttctgagtgaccggcccgccagaggcagctgcagagccggcgttccgcagggcagggcagggccgggccgctgggctggtccagtgcgcgcgggttccccctggcctcagccagccgcgggagatgccacttcgggcgacagcggcgagacgccgctgtccgcaactcctgggcgggtaggaccgtctgctgcctctgcggcccttggggcagactccccaggagtcccttcctctctcctcccgcccgggggccgggaccgcgctgtgcccacggagggaactgggcgtctctggcgcactggggctccagctgcatgatcccagctcagaccttaagcctcagtggggtgtaggtgggatgggatgtgtttttaggagatgaggagaccccggttgttgagtcgctccccaaatgcgcagtttcttaactccaggtgacatccgtcttttggaggaacgagtgaaggccgtttaggcgaaagaggggtgggtttcagtatttggatcccttcccccagctctgccaatctcaggtgtgtttacggtggaggtgacagaaggaaggcgcgtcgggggacccaggcctcgcaggtcttcggctgtcaacgaggcaccgcccactgactccgcgcttcgtccctcacagcgtggggctcggcgctgcgccaggcccgggtgcggggcggagctaggctgggactggctgggggccgccccgcccggcgcctgggcctccgcgccggcccccggggaggagttatgataatttccttctcattaaggcgctcgggtcccccggctatcgccaggacacactgttcgggcgcggctttccccgtccgcggagcggtcttgacactcgcggcggcagcatctacgctcgcagagccgccgatgcgtgtccagtgacccggacagcaaggcccgcgcgcggcgggggcggcggcagacgcctggtcaccgtgaccccgattttggatttaccgcttgggggctggggggatcctggatttaactggcgactgttttgggggacgccggacgccatgttgtggaaaataaccgataatgtcaagtacgaagaggactgcgaggtgagctggggctccggggtgcagccccgccccgccgaggacagtccgggaggcaggggccactggaccgaggtcggggacgagggcataggagccctggcctctcggtgggacgggatccacttctccggacaccccttagtccatttctgcggggcccctttcctgtatagggccttttcctaaatagcctcccctcgggaacgaggcctggaaagagaatggcaaatcccacccacacagcttaccgggcgctttcctaagcggcaaacagccctgcttcccgttttctcggaaaagtgccccgtctgcaaccctcagacgtggcttttacgcacgaagtctctgtccaaaggggtcagatgaggctacctgctagcgacaccttggcggacactcctccaaggccggcttgtcacctgccccgctacctcctcggggaagcacgaaaacaaccgaagtttggctttcaaaagaagtgggggctggggagtggtggtgggggtgcccgaggccagatggggccgtaagagctcgcgagtgctccagcctgtcggacaggttgagctagagtttcggagagtgggagggaagaaggaggcggcgagcgggaagaggaagaagacgcaggcagcgctaggcgagctcaggggcgccgggagcgcggagctcgggctacggactcgcgggagttcactgcgcctccgggccctggagggctgcccctgcccgcaggcccgggcgcttccgccaggaggcgacagcgccatgttcctccaggttcccggcgccccgagacccctgggcagatggggacgcatcctttagaaactgagtcgggccgcccaggggcgagggaacgtgcgcgggcaaggctgcccaatttccagggttcttcatgccccctctgcgccccgacgtgcgagaacactgcccttggcagtgcagggcgcccccacttattactcccctcggctgggcccggccagcagggagggccgccctgtgcgcgcgctccctcttcacttcccagggcggcgcagggtggcgggccctgctttccgagcgccgcccgctcggaggtctttgtcccgagggcgtggaagggagggtcccgggggcgggggaggtgcgcatttcccgcgccgcgcactctatccgcgcctgccgcgctgccacctccagcagtccctgcgtcatgggcgggctccacgagatagctctgcaccgggcgtccggctccttcgccccgggctctggctccttcgccccgggctccggccacggacttttctggcccaagacccagggttcggacttggcgcctccaagcgcctcgggcttgggagcagcgcctagaccttcgccgccgggctttgagaactcgttcccccaggtctttcaccagactctcctccctccccgcactctttgcttacaacgaaatcctcggggcgcattgcccccgggtaccttccgaccctgggcaagccccgccgggcggggtgcggttggtcccccggggccctctgcgtagcccggcgatgccggccagttcgcagtagcggggtttcgcactaacggggtctcctgtttttttttttccctccaggatcgccacgacgggagcagcaatgggaatccgcgggtcccccacctctcctccgccgggcagcacctctacagccccgcgccacccctctcccacactggagtcgccgaatatcagccgccaccctactttccccctccctaccagcagctggcctactcccagtcggccgacccctactcgcatctgggggaagcgtacgccgccgccatcaaccccctgcaccagccggcgcccacaggcagccagcagcaggcctggcccggccgccagagccaggagggagcggggctgccctcgcaccacgggcgcccggccggcctactgccccacctctccgggctggaggcgggcgcggtgagcgcccgcagggatgcctaccgccgctccgacctgctgctgccccacgcacacgccctggatgccgcgggcctggccgagaacctggggctccacgacatgcctcaccagatggacgaggtgcaggtgagcggcgctgcggctcctgaccggacctgttcaccctacg

SEQ ID NO: 10702 - DNA, 6511 bp, Homo sapiens; identical to SEQ ID NO: 10701
  source 1..6511: mol_type = unassigned DNA

SEQ ID NO: 10703 - DNA, 338 bp, Homo sapiens
  source 1..338: mol_type = unassigned DNA
ccgccttccgcgcatgcgcccaggccggtccgcaggcctttctcgccccagccggcagccagctcgttcgcgctggggtcaccgcgagccggtccgcagcggggtcaccgcgatccccggcgcagacacagaggccgcccccagccccgccgcctcgtggtcccgcccccgctgcacgctcccttacccctcggacctcgcagggccgcggcggacacggcccgatcggggacgtgaacgcgcagaactacatttcccagcgtcccgctcgcgctggaactacacttcccggggggctcggcggtgcacccgccggggtcgcggattggaggtttccg

SEQ ID NO: 10704 - DNA, 936 bp, Homo sapiens
  source 1..936: mol_type = unassigned DNA
gcgtcctgcccgctcattgggcctcccgccggctcatttgcatggtccgaggggggcggggctgacgtcgcgctgggaatgccctggccgagacactgaggcagggtagagagcgcttgcgggcgccgggcggagctgctgcggatcaggacccgagccgattcccgatcccgacccagatcctaacccgcgcccccgccccgccgccgccgccatgtacgacgcagagcgcggctggagcttgtccttcgcgggctgcggcttcctgggcttctaccacgtcggggcgacccgctgcctgagcgagcacgccccgcacctcctccgcgacgcgcgcatgttgttcggcgcttcggccggggcgttgcactgcgtcggcgtcctctccggtatcccgctgggtgcgtctggggacgctgcccgggctccacgtgcggagtgggtgccccctaggccggggagcgggggatccccaggggtcgcggggccctggaggagcgggcatcggacgcggacacggcggggtgcatcccgagggccccctccgaggcagatgcttcctgcgggggcgctgttcctgggcccgggaagggggcgttggaaccccgagcggtccgggccgaagcctgggactctcgtgcgtccccacccctacccccatcaggcgcccgtgcatgaagggagaccctcacctccggactgagagtcggagcgtctcggagcgacggggagtagggagcgggacccggggcggagggtagtgctggcccctgcggactccgggtcccctgtgtcctctcgggaggggctggacgggctgagctgccgaggggccgatttgccctgggccggacaaagagtggggctttggccggtcccccacggtgggctccttccctctggggattgagggactcaagacaccccgcgcctgcg

SEQ ID NO: 10705 - DNA, 2184 bp, Homo sapiens
  source 1..2184: mol_type = unassigned DNA
gcgcgttcccttaacccccttgcgttccagctcccccggctccagcaccttcgtgacctgagcaccggcgggctcctgctcactgtccagcacccgacgcacctgtccccgccgcgcagtcccttccccccggcctgagcttccctcccggcgcgcactgcccttgtgaccctttccctccccggccacagatgcagctctcggccagaagctccacttccccgaggccctcgcccctgccaggcagctcccctgcggcgtcgcccacccagagttctccccctggacgctccctcagtgcccccctagcagccccggcggtcttctccccaccttcagccccctccccggtcccccaggaaggggccagactccagctcagcacccagcgcttcctggtctttcccttctgggcgccctcccgacagttccctttagggaagttggcccgctgcgcgctcccacccccggccgccgcctggacagaggcgcgcaatccggagggcgcaggctccggcccggagaagggggtgccgccggcgttccgatttctcaggaatggggaaacagaggcacggtggatccggcggcggggctgggtctggggctggacgttgacctaggaccccgcccctgcccgccctgcgccgcgcccctcccgggccggccttgaccgagcagctccacgcgggcccggggctcgtccacccgacaggagcggggggctgcagcccacgagcccacgagcccgcagcgacgcacccggagtgtaacctcgcagagtcacggagacactttcccggtgtgggcgcctcgccgcgcttcctccccgcgggctgcggccaccccagggcaggacagagccgagatgcccgggtgggagcgatgcccgcgtgggggcgatgcaacgggggagatgcctggggggagggtggtaaggtgaaacctggtggagaacaatgggggtgggtgggcgattcctggggaggtgcccggtgtggggtgtttctggttcgcccggggacagtgcgcgtcccctcgcccgcggcgcccgccctgcccgtcccaccgaggtcccccgggagcgtctgggcccacggcttcggggggtttctccgagacctgggcgctgttctgggggagcaggggcccgggccaccaaggttcgtgcggaccgtggggtgtcccacgcccaggccgggggatcccagagccccgcttccctcaagggcgccgcgccccggactgcaggtggagacggggaccggccccgcggggtcgccgacaggcgcggggcgggacagggtgggaggcggcggggcgcagagtcctccggtcgccggcgcgatccgggcaccttcctggaggcggcgggagcgcggtcgcggcgcctccggggtggggtccaggttggaggctccggggcgcaccgccctagccccaccccggccgggtccccgcgctgcctctgcggagagggaggaaggaaggaaggcagggagggaggggacggccggcaggcgtggggtccgcggcgtcagggctccttcctcccgtccgctccatcctgcaacccgtagcccgggcggggtctcgctgccccctccccgaacacagccgccttttcctccctccccaaccccgagcgcctcccttcccgaatgcgggagtccatagtgcacgggaagcctcttcccctccccaccgaggctgcccgacgccccttccaccctccgaccccccgcaaccatccctcaaatgccccggcggccagcagggctggggtgggcgcaggagaaccaggggtcctgcccgcatgcaggggtttggggtcggtgtggccgaatgaacgcgcgggttcagacgagcctgtgatgcccccgctttccatctcctcgcgacctggccccagaagacagtctgagaggccggtggccgcggatcctggacgcgcttccctcctgcctgtggtttccctttattccggcagcgctgtgagtccacccttcactcataggagccacatccagaaccttctcctggggccacagcgtgggcttccgatacctgtgtgaccccagctctgccccttcagggctgcgtggtgaagccctcaggaccctccgcgtgggttgggcgggtgacgtggatgagggacaacgtggtgaggtccccgtcgtggcg

SEQ ID NO: 10706 - DNA, 413 bp, Homo sapiens
  source 1..413: mol_type = unassigned DNA
ccggggcgtgggagttgcgctcgctctcctttcccggcgtcccgtggagaccgggaggctcagcgcctctcccagctctcagcgccgccctcccagaccccagagacgtcggtcagggcgcggcgccccgggccactgcgggctctttccgggcgggcgacgtggggggcgaggcaccgcgcggcggcgcctggcgggcactgttgcccgcggagggacggtgggggggtttcagcagctggcgggggtggagggggcgggagagggagcctgcgccgggctgagcctggaggtgcggggcgggctcggggagcgctcttggggctcctcctgccacagccggggcggctggaactctctccctttctccctccatccttccacttcccctgctcggccccgccgtcaggccg

SEQ ID NO: 10707 - DNA, 403 bp, Homo sapiens
  source 1..403: mol_type = unassigned DNA
tcgcttagctcctgcgcccggaagaaaatccagcgcaggtcgggttccggcgcgcggaagccctgcgaaccccaaatgtgtgcgctgagccgaggcctctaagcggtaggagagaatctgacctccgacattcttttcaagacacgcgccggtggaccgggtcctgggattggcttactcccgggctggaccttggggttcgcatatttgaaagcgtaaacttgaggaatgacggcggggtgatgggtattttatagagtgggactcaatcgtgctcagcaacagatttctccaaattcccttttaaaaagagcctcccagagctgtcgaaatctccgcggggtgaaagctaaacttttggagtcgctgtgtagccgggtagaggacacggcggcgcgagccg

SEQ ID NO: 10708 - DNA, 675 bp, Homo sapiens
  source 1..675: mol_type = unassigned DNA
ccgttcttaaacgcacgactacttccctagctttccagcaccaaatccagcggccccacccggccacgcccccacgccaggccatgacccccatatggctcactgcgcaagctcacacccagtcccaggaagcgagccccacgtcgccccagctctgcattcacagccgccaagcggtcccggaagccgaatgccggataggtcaaagacagcgccgctgctccggcactgccgccagagggcgcggagtcgccgtgttggcctgcacctcccttgtcacgtcagccgaacggctacggcaatggaggattttgccgtatgcgacgacaggatgactgcttcccctgaagcttcaccaaacacggagaggctttcctgtccctgggagacgcggtgatgtgacgcagcggttgcagcgaaggtttcttgtaaaagatggccgctgcggagttgctaggtgtctcctggcaggcggcggccgcaccacaagatggcggcccgccccagggtcccacacgcggggctgcggaggcggcggccccgagggtccccgccccttgctggccctgtccccgcgtgcggggctgcgacctgcctttgtgtgcgggtggaagtgcgggccgccttggggccgagttgcaacttcgcgacactccactggagtgcgatgagacg

SEQ ID NO: 10709 - DNA, 580 bp, Homo sapiens
  source 1..580: mol_type = unassigned DNA
gcggtggccgaggacgccctttctggcgtccgggggcaccggaccgcggctcgccgggatggaggcaggcaggcagcgtctcgggagggctctagggagcggcccggagctgctcggcggggcgcccagggcgcagcgggcagcgcttaccgagggcgcgcaggtactcctcgaaattctcgttgaccaacatcttccagtacccagtgaagtcgactggcatttcggggagtgactggagccagttggccacaagcgggcgggacggctggagactgccgggacagcggctgccggtgctacgcgggtggtgggcggcccggaaatgagcgccctccggggacagggggctctgcggggcggcgacagctggattcccagcgcgcacaaagcctgcgggaggatccattgtagcggtcgctcctccccgcttagcgagggcgggcgcaggggcgggggatgtcgaagggtcaggtttgtccaggccgcgccaccttcgtttcagacgttcagttcgtttcccctacaaaggaagaggagaccggagacgggacgtttgctttgttggccgaactcttcg

SEQ ID NO: 10710 - DNA, 858 bp, Homo sapiens
  source 1..858: mol_type = unassigned DNA
tcgggcacgctgagttcaccgagaactccaaggagtcaacgagggcgggtgcccctacacttccccagggaccagcgccgcccgaccgcaattctggggaagaccccggcggtcctggagaggagggacaggcccccactactcacctggccagccccgcggaagggctggtggatgaatgaactgcccccccgccggccgagcctcgcgggacagcggcggaccgcggggtgctcacctgtggggatgctcgagggcttctccgagtccgcacccagacagggattccaggggtggaggacgagcgccaggagcagcagctgaggcttcaccgtgcatccccccatattcggccctcgagggccgcgcgggctcaggcgcccacggccccgcagcgccgcgcttctcgcgagaacgcagagacccgggtccgccctgagccgccgattgcgggcgggagccggcgggcaaggcgcgcggccggcagccggagcggcgcgtaacgcagctgagtgaggtcgtcggtggaggcacggagcagcaggcgcccggggcgctgcggaggccttataggctccccgaggggaggcgacggggcgggccgcgccctggctattggccgccggctgacccgccgccgctgcgcgcccggtgcggtcgcctcagctcgccctcctgggccccacgtctggactgtttgctcagcgcggacgctatttaaggagctgcctgcggctacgtgtggaggctcacgcagcgcttctggctggaacggggaagcctgcacttagctttgggagtgggtttgggagagggaggaggagccgccgggagtctggcgggagggcggtgttcccg

SEQ ID NO: 10711 - DNA, 5715 bp, Homo sapiens
  source 1..5715: mol_type = unassigned DNA
ccgggacccggccccccgcacccgccgccggtgctgccgacgcccacagcgctgatgagacccccgaggcttcgggtccggccccaggagctcttgtctcccggctgaggaagcggcggcggcggcggctgcggctggggtggcagcccgggctcctccctcacgtcgatggcgatgtagttgagaccattctggaagccggcagaggtctctctgcgcatgggcgatccaccgctcccaggacaaccgaccaagcccccgggctgacccggggtccacggccggccctgcggtgccaaagggggcgccggctgcaactgtcgtggggaggtgggcggctcgtcgccccctccagggccgacacccacgccgccctcgctgcttttcctgagagagacattttccacggaggccgagttgtggcgcttggggttgtgggcgaaggacggggacacgggggtgaccgtcgtggtggaggagaaggtctcggaactgtggcggcggcggcccccctgcgggtctgcgcggatgaccttggcgccgcggtgggggtccgggggctggctggcctgcaggaaggcctcgactcccgacacctgctccatgaggctcagcctcttcacgcccgacgtcgggctggccacgcgggcagcttctggcttcgggggggccgcgataggttgcggcggggtggcggccacaccaaaagccatctcggtgtagtcaccattgtccccggtgtccgaggacaacgatgaggcggcgcccgggccctgggcggtggcaacggccgaggcggggggcaggcggtacagctcccccggggccggcggcggtggcggcggctgcagagacgacgacggggacgcggacggacgcgggggcaacggcggatacggggaggaggcctcgggggacaggaggccgtccaaggagcccacggggtggccgctcggggcgcccggcttaggagacttgggggagctgaagtcgaggttcatgtagtcggagagcggagaccgctgccggctgtcgctgctggtgcccggggtgcctgagcccagcgacgaggccgggctgctggcggacaagagcgaggaggacgaggccgccgacgccagcaggggaggcgcgggcggcgacaggcgggccccgggctcgccaaagtcgatgttgatgtactcgccggggctcttgggctccggtggcagtgggtactcgtgcatgctgggcaggctgggcagcccctccagggacaggcgcgtgggcctcaccgcccggccgcgctggcccaagaagccctccgggcggccgccgctaggccgcacgggcgaaggcactacagggtgagggggctgcgtggggccggccccgaaggcgctggccgcctggctgggccctggcgtggcctgaggctccagacgctcctcctccaggatgcgccccacgggggagctcatgagcacgtactggtcgctgtccccgccacaggtgtagggggccttgtaggagcggggcaaggagctgtagcagcagccgggaacgcccctgagcggctccccgccggggtgcagggctgcggagaagaagtcgggcggggtgcccgtggtgaccgcgtcgctgggggacacgttgaggtagtccccgttgggcagcagcttgccatctgcatgctccatggacagcttggaaccgcaccacatgcgcatgtacccactgtcctcgggggagctctcggcgggcgagctggccttgtagccgcccccgctcgccgggaatgtcctgcccgccgcagaggtgggtgctggccccgcaggccccgcagaaggcacggcggcggcggcggcggcggcggccctgggctgcaagatctgcttgggggcggacacgctggcggggctcatgggcatgtagtcgtcgctcctgcagctgccgctcccactgcccgcgagggccgcgccgggcgtcatgggcatgtagccgtcgtctgcccccaggttgctgctggagctcctgtgggagccgatctcgatgtctccgtagtcctctgggtaggggtggtaggccaccttgggagaggacgcggggcaggacgggcagaggcggcccgcgctgcccgagaaggtggcccgcatcagggtgtattcatccagcgaggcagaggagggctggggcaccggccgctgccgggctggcgtggtcagggagtaggtcctcttgcgcagccctcggtccaggtcctgggccgcgtcccccgagacccggcggtaggagcggccacagtggctcaggggcctgtccatggtcatgtacccgtagaactcaccgccgccgccgccgtctcgggccgggggcgtctccgcgatggactcgggcgtgttgcttcggtggctgcagaaggcgcgcaggtcgcctgggctggagccgtactcgtccagggacatgaagccggggtcgctgggggagcccgaggcggaggcgctgccgctggagggccgctggccggggccgtggtgcagcggatgcggcagaggcgggtgcgggccgggcggcggcgggtaggagcccgagccgtggccgctgctggacgacagggagccggggctggtggcggcgggcggcgagtgcgccacgggcatggacatggagcggctgtgttgcagcgcgccccctgccggcagcagcgccaccttgctcccgcggccgccgcagccgccgctcagggtgtgcgagcggctcaggggcgcgcgcaccggcccggggctcagggggctcccagccaccgacaccggcctggcgcccgcggccgccgctcccgccgccgcgccgccgtcgccctcgctggcggtgcgcacccggcacgagctgcacttggccgccggcggggtggcggccaggctgtcggtgcgcgagcggcgcaccaggcccgtctggctggggggcaggttgaccaggtggtggtggcggcgcgcgccggggacgctgatggggtgcgtggccgacgaccccgacgattggctcttactgcgcggccggaactcgaagagctccttgagcgccttcatggcctccaggatggtctcgtggatgttctgcgccaccaccgagtcgtccgcctgcatccacagctcgccggggcctgtgacggccgagcggcccacctcgatgaagaagaagctgtccgagtggccgcagcggcggatgttcatgagctgcagcgtcaccgacggctgctcgcagttgagcttcacgaagccgatggtgcgcgcagacaggcacagacggtacacccccgtcaggttcttgctctggcccagacccttgggcttcaggttcacctgccacacctcacggtaggcggccgtggcgggagccaccagcccgtagctgtcctcggccccggcggcgccggcagagccgcccagggcgccgggcagggaggcgctgcaggacgcggcgggcgcggcggcggggggcgcgtctccggcggccgcgcggccctcgctgaccaggtcggtgagcgcgcggtaccagccctcctgctcctgctcgttctcggcggccacggcgaagtactcgtccttggtgtagagggcgatcaggtacttgtgcttggcgtcggcgcgcttgttgatgttcaggcagcagtcgagagcgatcacccgtttcggcgcgcctgccttgctccgccactttttctcgctctcgtagtactcgagccgcggcggttgcggcgccgaccccccgcccgccgtcgcctcgtcgccgcccgcgccgggtccgcgcagcacgaagaagcgcttgtggccatgcttctgcttgcgcaggtagccgcacttgcgcacgctgtggttgttgttgttgttgttgttgttgaggttggggccgtctccgctcgccggcccgggcggcccgtgccgcggcgggctcgccatcgcgggcgcttcaggccgcgcggcccgggcccggcgcccaggggttggggcgaggggcggagggggcgcgggcgggggcggctccctcccacccttgcgcccggccgcccgcccgatcacgcgtccctcgggcccaggcggtggggaaggtccggggaggcccgcgggggccagcaccgctcggcggcgccgcgccctccgcgctctggggctcctgaggatgcccggcgcgggcggtggccgcccccctccccggctgcctgcggccgctgcctcctcgggctctcgggcggcgccgggggacgcgctcgctgggccgggagtcggggtccccgagccgcggggccgagcctaaggcgcgcgcggccgcaccggggctgctgccgccgcgtcgcgctccgggaagccggggtgcgcccgggcgctcggggtccgcgccgccgccggggctgctgctgctgctggtgttgctgctgctgctgccaacggcgacccgggctcgtcgcggtccccgccgcacagtgagtaacacatcgcgcaccgagtgactgaactaagaagagcaaaacaacatgtgactcggcgttacgcaggcacacacagcgcggccgccccgccccgctgcctcgcattggcgccgcgccccccgacggacggcgcgctcggccaatcggcgcggcgctcgcgggggcgggccgcgcgcccccgccccgcccccctttctccccgggccgcgtttcccgccgtcccctccccctcccgcgaaggccccggcccggccgggcggggtggggcggccccggcctcattaatcagcggcttgttgtggatgccggcggaggagatgccacccagggcgggaaaaggggcgcggaagaggggcggggcgggccacggcgcgcagggcccttccctcccgcctcggactcaattaattgggcttgagcttccgccggggagggggcgccgggcggggccgcggctgggcggggcgggggatcgggatcggcggcgggggctgcggccttgcagtggaagcatgggcggcgagccgggccgtgctctcggggcgcggggtccccattttgggcgagggcggccgctcccgcgctcggggtgggcgcgccccatccccgtcccccgtttcccgtccccgtctcccggccgcatctccgtccccccgcagccgcgaaacgcggggaggttccagggcccgcggccgcgggttcgcgagcaccgcgctccagatcgagagcggcgcgcgcccttccgtggaggacagaggggcgcggagggggcgcctgtgtcccacccgctcgcgggcgctttacggggcgtcctctgcgccattcacttgtcagcttgtcgggaagttgaaatcgcgtttgggaggtaataggagaaagagatcggggacggcaggcggagaaagtgcggtttccatagcgccggggagagggcggacccgcgagccagcggtccctgagccgggagaccgcgcgggcgtctctccagcccccgcaggagcgccgccttccttccgcaggggcgtcctctccccccaccgctgcaggagcacccccttccttcctcggaagcgtcctctcaccacaccgcttcaagagcccccccttccttccacaggggcgtcctttccccctccgaggcaggagcgccccttttccccccacaggagcgccctccccaccccaggagcgccctgcgcccagcagacgggcaggtgggcgggcgtccactacctgtgtgcgcggtgcgggcg

SEQ ID NO: 10712 - DNA, 858 bp, Homo sapiens; identical to SEQ ID NO: 10710
  source 1..858: mol_type = unassigned DNA

SEQ ID NO: 10713 - DNA, 247 bp, Homo sapiens
  source 1..247: mol_type = unassigned DNA
ccggaaccttcggggaggattaacgccggcgcaccgtgcggccggggcggggcgccgcccaaactcaggccctgtgacagcgactgtggcggtctggaaagcgtgggcctcggtcattgggcacgagcggtcacgtgacagcgggttcctccaggccagcgctggtggttgagtgatgtaatcacgtggggtctgaagtcttcgtgggtgtaggtttcttcgttatgctgacgacaggcagtgcccg

SEQ ID NO: 10714 - DNA, 224 bp, Homo sapiens
  source 1..224: mol_type = unassigned DNA
acgcccgcccctcttccgggcagccccttccacccaggcgggatctgggtccccgctggactcagggccgccttcccgcaggcggggccggcccggcgcgcaccttgtctcggatgccctggcgcacggcctcgcgctccgcctccatcttggcgtacttggccttgcgctcctcctccgcctggcgcagcgcctcctgccgctcctcctccttcttggcggcg

SEQ ID NO: 10715 - DNA, 1174 bp, Homo sapiens
  source 1..1174: mol_type = unassigned DNA
gcggcgaaccaaagagcagggaatcacaaaagacggccggcggcgagcaggctggggtgacggggaccccgtggataacgggcttgaggacgcccagggcttcagccttttccaggcgtccctcgccggggcaacgcagagcagctgccgttcttcccgcgccccagcagatggtggtgtcagcccggcctcgtgcccggccgccgctgcgcccgcgccccctcccctcgcagatggcttaatcagggctcccgcccgcccctccgcggcccccgccccgcgcgtctgggcgagcgctgcgaacgtggagccaggcagtcaagtgttactgcgtacagcaggtagcctggcaactgagagcacaataccgagcagatggtgttcgcacggcgtgatggacatcacacacgacagcctgagacaatccaggaattccctggtgactcgaggccctctttgcacaaaatgagttctctctccattgccgtgtatctctggggttatctgcccccctcctccgactgacactgaactggtttctcattaccgacttttcttccagccggaggggaggaagaattcaagtgggggagggcgcgggaaggggacgtggagggaaacggaagggctgggagtggggtaggggggcagtggcgacctccggggggggagggtggcggacaccagaccccagggccgacagcccgggagggaccgggttccaggaccccagctgcacaaagccggcccggggagggggcgataaggagcgagcctcgggtcggcccggcaccgctgcttcggctcagagtccttgcaatcgcttggcctacgaacaacctaaatgaaatttagggttttattgaaaaagtcccctggggcctaatttagcctctcgactccagcctatatgcttacaagtcctcaggggactccggctaggaagtcaggagtggggcccgtgcgtccccggcaggacctagactgcctctcggcgcaggcggccctaacaaagaagcccacgaggcggtcccgggcgcgggcaggggcggtgcggcggcgctcgggagacccgcgaggggccctggaggtcctcggcccgcgcgcgccgctcgggagcccgcgaggctgcggtgtgctccagcgggcgcatttcccaggccccgccacatcg

SEQ ID NO: 10716 - DNA, 8657 bp, Homo sapiens
  source 1..8657: mol_type = unassigned DNA
ccggaccctccctcgggtctcccgggcgctccgcctccccggggctggctctccctcccctcccgggcgccgccggccgcgggccgcctacctttcttgggctcgtagccgccgcccggggaccggtagtgggactcgagcgggtgcgcgcccgccttgcccgcgtcgctggccgcctttggcgcggtgtgcagggcctcgccgggggccgcggccgcagagttgtaccgcaggagaccctggccctgcagcgccgcgttcaagttcccgtagtttgtgtagttgccgtagaagggcgacgtgtagtagagggggcggcccagcagcggcgaggcagggtagggcgagcctcctggcggtgccccggttgaggccggcgcggcggccgcgggcagccccggtggcccgcagcccgggcccaggctcggctgcttgaggtccgacgtggcgatctcggccagcgaccacagcttgggcttgctggcggggggcggcgcgcccggagacgtccggctgccctggggcgtcttgcggccaccgcggggcgcggcctcgggcggggggctcagcagcggcgcctccaagccggtaagcggcgacgaggtcacgggcttgggcggcgccaggccccgctcgccctcctcgtcgtcgtcctcgtcgtcctccaggtcgtcatacttgtccttgcactccgagcccgattcgcacagggggtccccggcgcggcacggaagcttctccccgtccgactcggccgagcacgagtgatccgtgagcgagtccacgtgcaggctgatccctgtgggggcgcgggcacggtgggtggcacgaggggacagcgcaggcacctggagccccctccgccccctgtcctgcggcactgggccctccccacgggacccctcacctcgcccccacccggccacgtgacaggcggagcctgacctccccgggaagggcccgaggaatcgctcgctcaaatcccggcgaccccagggcaatgtggtgcggctggggctccggcccggacctggggtgtccggcgggcaacgtcctccccgccttagctctgcgccccgcctgggaagaaagcgccccgagaccttgcgccggccgctgcccgctcaccttcgtcctctgccgaggtctccgtgccctcctgcgccttgtcgggactctcgtccttgcttctggtagcgtcgccctcgtcctcgtcctcatcttcgcttttgtttctcggggcccaggtcatcttgttctccttcttgaggcgccggcgcgcgttggcgaaccaggtggagacctgggtgagggtcatcttggtgatgatggctagcatgatcttctcgcccttggtggggtaggggttcttgcggtgctcgttgagccaggccttgagagtggccgtggcgtcccgcgtggcgttcttgcggtacgcggggtcgttgagctggtacgggtaggccgcgctgccgtacgggtggtagctgatggcgccggtcatgccggtggtgtgcgcgtcgtagggtgcgccctggaaccaacaagagcctgtgagtggagtatgcggagaccccgcgggcaaccagccagaggatgccacccctccgcccgcccacggccaccgttccccccgtgagtctggctctggggctgcgcttcccgccgcaaaagagcaggaaaaacgcagtgtgattcgggaccagctgttgatcacaaaaagtaccggagttttattctcgaatttctgaactatttcactttcctaaaatgacccatcttcccctaagtgttccggagccgctcgtggcaatgtacacaaacccttgcacgtgcgcgcacacaggcccacaggtagctctttgatatctaaatttctgcagatgcttggagtgcggctgcctccccctactccctcttcccctcccttatatggttaaaaaaacaccccagagcccccaattcactattcactgctctaaagctgggcaaatccaatttgcaactcagaagccagtcaccgtttcgaattcttcaaatacgccgtaattagcattttaattcatcctttaacgtttaaattcgaggcatttgcagccttcgccaaggccccagcgactcggtcgctgcccagaaattccgccgagggccggcagtcgcgacaaccccgtaatggcctcaatcgcccgtaacgtgcttcgccgcggcccgggcctggcccagctcagtaacctcgagactcgcgagccgcccccaggtcgccggagcaggagctgcgctcgggccacggaggactcaggcggcccttagcgggtcacgcgcccgcaagcacgatatttgaaagcatggtccgctggacagagtaaggccgaaacctgggcgcctcgggccggactccggagccgcagctgaatgctcggctcctgggcctaactcggtgacccccaccgccctgagccccgcgagtgaatgcgaaccgcccggccgtcggctcagaggccgcagtgacgcggaccctcgcgccccacgccaatgcaggcgagcacacagcccgctccgaacgcctccccaggctgcggtgcggaaaccagggacaaacggcgccagaccccggccccggcggagacgcacttcccaggctctcagagaaaatcagccggcgagccgaggggacgcgcggggggcgcgcgggtcccggccgggctcagggacgtccccgcctgccgcgctgccctccccacccggggcccggctcagcctgcggggcggccaaccgagccggcgactcctgagtcgccagccgcgccacattcccggcggcccccgcccgccgaacccgagccccgctccgcctgagccccgtctgggtcccggcgcccaggagtcccgcgtcccgcccgcgcccggttaccatgtaggacgggaagccggcggcggcggcggcggcgtcggccgagtactgcagcgggctcccgaagccggtggccgcctgcgccgtgaaggccgccgagcccgggtaggggctgaacgccgagcccgacgccgagcgcgccagctcctcgctgcgcggagccgccaaagccgacgcgccgtaggccgggcacgagtagagcgccagcgagccgggcgcctggtacaggtagccctgcgggtaggacatggtgggcgcggggcgcggggcccgcgtcacgccgagcagcgggcagggcgcgcggcgccctccatccacgcccggccggggcgcggcgcggcggcgggcacccggacggccggcggaggcaggccggcccgggtactagcctgggcggcccgcgggccggggcggcggcggggtggcggtggcggcggcagcagcgcggagccggtgggcgcagccgcgcgccaggccggcggtcggggtttgggggagtctggagtcgggagtgaggagttgaggaaggagcgctcgagtttccgagggacattggaacgcgcagctgtccatcacgcgctcatctgcatattcgggggcccgcccctcccctgctccgcccgctgcagcctccgggccgcggccgggggaggggcagagagacgggagggaggcgggggagggcggaggcgacggaggcgggcggcgggagggaccggcaggcttttgtggcgcagccgcctctctagcagctccggccccagcccgcggctcgcggacctgcagcccagcccggccgcgctgcgtgccccggcgcgcacccctcccactcccatccactcggagccacgtcccctgcccggctccggccggctcccaccgtccccggccaccgtcttcgcccctgcccggcccccgccccttccagccactaccccgcccccacccccttctccaccctcacggactaggcagaggccgcccgcggtcaggccaggccgggtccaattaggggactcacagcctgccccgctgtgcaccccgaggaggcccggcccctgtgtccaatccggaagtcgcagggaagtggggaggtcaggatggtggcgcccgcggctcgggtcttcctccgggcagtgcgcgcggctctcacttccacggtcccggacctgctctgcctcctggcccgaggctccccgcgtggcctcgcgtctggtcgcctacccctcgcggtccactccgcccagcatggacctggatccggggcgccttggttgcgaattgccaggagggccctgaggtgagctttctgcccccaaatccgcagcgcaacccccggggccctgaacgttacgactttccactgttgggaatgacgccagggcttcagctaagaagacgccgtcccctaaagagttttattttattttgtttttctaagttgactcctctttcagatttgtgttgtcaaaacactggggggatgattgttacctgacaaaccgcctctggcaggacctgaagcctcccagtcacgtcgagaacgggcaggagctcaggttggcgccgccggtgcagtgggcattacaggtagctcaggtgacgcgcggctggagtaggggggcggttgccttgcggggctcagaagcgaggcggttggcgagggttcctaggaccccagcttcctagaaccctctccccatcacgcttctccaacccttttccactcggggatggccgaagagggcgtctggctgcccactccgaagggtcacctatggggggcgctcagggggatggaagagtgtcaggtctgtgctggcctattgggagcacccacccagcaggtgcctctatcctcggaagccgtctcgggtgggtgcggtggagaagagagagcgcagtggcctggggcgggcctcagctcaggcctgcagccgactcctgcacccctgctggccctgcagcctgcggagcagccttagtgatctcaggacgcagggcatgttgcggcctccctgtggtgcggctgcagcggcgcggagggagcggagcccgggttgccagtctggtccagggcgcaagagaaacactcacggcatcaggctgtctttccccaggtgcaagggaaccagttgcaaactgcagtgctgtgcttgaggatggctcctcctgagccggcaggctcccggtaggcgcggtccaggcacgttacccctcccgccaggagctcccgagccgagccactcgccccctaccagttatcccacccaccccttcgcccacactgctcccccaccactcttcctacaaaccacacccccatcctgcacacatcctcttcaggccatctcaacacacgcacacgcacacacacccacgaccacctctccctccacccacagacaccccgttcccacaggctgggccccctgcaacgacccagcggggggtttcaaccttgttgcgactccacatgggacatcctaattcagtccaggacagatatttttaatcaattactatagagctgaaaaacagagagagagagaaagcagccgggttgggcaagccgtcgacagtctgcgacatttttgcgcttcctgggagggaattcctccaagaagaggggtaaatgagaggcccacacgctggatggcaaacacaaacactgtcagatcagatggcaacctttagggttcctttacgatcagatcagtttaaatgaaaaaaaaatcgggtgtaatttttatcaccagggagcactggcctggagtatttccatttctaaagagcggttcccgctgtggtttcattagcatttggggctcatcctccctccccctcccttgacccacccccctccccccgccggacctctgccaggggcagaagagaaaacagccagttattatacaaacatcctcagtttggagctggagtgtctgctctggatacagtcgattctgacatcaattaaatatataaccagacacgtgcagtggcggggagggtcccctcacccagggtgcatctccagaaacgccgcctgcccttccccctctttagctcagtgttgggagtttgaagatggcctcttcccgtcctgtgtgtattttccccttagcaattatactcctccactgaaatctatatgttccataccgctgctgcctgttactaataaaaaccgtctaccttgcactattaaacagtcgactcttactacatgccgtttttattggtagtgactgtagcaaattaaaatgcctacgcagggacattaaaaacttaacactcgtcattgttattgaaatatataaactacgttttgctttaaagctctctgatattaaagaaaaaaatcacattccttcttcttaagttaaagttggcttggtcttcttcttaaaaaaaaaaaaaatcaatcatgagaaaacatgctgccagcgtggagtcttggcgcggcggtcccggcgaggctgcctgagagggtggcgggctcagcccagactccgtctcggggccacgagggctgcaaggccgcggctcccgaagaggagggcctgggatgttttgctcaagggcgaggcggggtgctcaggcctgtggggtcgctggggagagcccggcacttggcttctgaggcttttcagttgccgtccgagcaggagggagggaatgagcaggcacgcagggaaaacccagtaactgctttgcaaacgcgacccctggtcacaataacccaggcgatgggggcagtttcaggttcctggtgggccctgccccctttcctaggtgtgccctaggaggtggggaaaaaattaacactgtttctatttttctttattgtccctgcaacagccaaagaatttagaacgagtctacgtggacacgcaagtttcagcgagcggggatttcctgcgaggccgagcgcgaggaacagccggccccggaggctcgggctcggggtctccccggggacgcggccgactgagaaggccggggcgctcgccgggcgcggcgccgtcctccgtgtcgcggggacggaaggaggcgacgcaggccaggagtcgtgcgcgcgggcggcgagggggcgctgtggcccgtgtctgccggcccgagtcccggcaacggtgggcgcgacccacctcctcccccggcggcttaattcggggaagaagaaaaaacggcatcgaggcatttcaataaaacctaagcgactcctgatcctttctcattgtggttccttatgagctttcggtgtctggcggggaaacagttaccgttcgggggtgtggcaaacttttttggcaattaagatgaaacagacgcttttatgtgggtttcctttaatgaagtaacattggaaatgtaagtagtttcagtgcatcaaatcacatcgctaccgtattcgcggtcaccggccctcccgttccagggctccccgcgtttgtcgagggagagagcgaggcaggaacagggggccggggacatgagaagtttggctaagaaatttttcttttctttgaaaacaaaagcgttgttataaatggaacaaaatttaagtcaacatggaacccacatctctttcaaacgtcgtttctaggtctagtactctgtgagtaggttggactggatttcacgctcaaccggcatttctaggctctcaaagacgcttccgaggcctaaatgttttcctggaaaacacgtgcagaggagcatccgtggaagactgaaaggtccccgcagctccagtcctggcaggatgtgcaaggcctctcgaggttttcaaatgggcccccgaggcctgggagatccccgagtagccacgcgggcgccacttcagggacgcggggcggcggctactgtgggccgggagggcccccgcacgggctgctctgagcgcctggacccgggaccctgcgcgcgctcttttctttttctttcgtttctttctttcttatttataatttacattctagggacctcgtattcagctaaccagctcttgcttacttaactgccctgttttcagctccggatttctgggaggtctccccatggctaacttgtccctcccggcatcctttagcgctctgcaaaatttgccttcctcccacagatgccccgcctccgacgtgcttcctgaagtttctctcccgctcagggtgcccacaatcctgaattctccagcatctcgccgactccgtctctaccctcctctccttcctaatctcgcgctggcttcgcccttttctctctcctcctccttcctacgcgccccgccccctccccccaggtcgcacctctccccgcccgggtcgggagcccctcgtggccaggcgtccgcgcggctcaagaccgaggtccgccacgctgggccgctcgtgggcggctctcacccggcataccgtggaaacggcgcgtcccgccagctgcggctccagcctgggagggagcgcagcgcggggagcctgcagcgtctggagagtgaggaaaagggacattccttggaaatggacagagccgagttccttaaagggatcgcagttgaaagagaccctcttcaaaatcagcaacgacctggcagccttagttcctcaacaggagatggttcgaagatgaaatgtttgaaactccgccgccgtttcacctttgcacacacgcgcacggcaggcccagatccgcacagagacgcagacacgcgcgcgctcgcgcttcccggagaggtcggcgcgtctcg

SEQ ID NO: 10717 - DNA, 1059 bp, Homo sapiens
  source 1..1059: mol_type = unassigned DNA
tcggtctgctaccgtcccccagggaacgagacactgctgagctggaagacttcgcgggccacaggcacagccttcctgctgctggcggcgctgctggggctgcctggcaacggcttcgtggtgtggagcttggcgggctggcggcctgcacgggggcgaccgctggcggccacgcttgtgctgcacctggcgctggccgacggcgcggtgctgctgctcacgccgctctttgtggccttcctgacccggcaggcctggccgctgggccaggcgggctgcaaggcggtgtactacgtgtgcgcgctcagcatgtacgccagcgtgctgctcaccggcctgctcagcctgcagcgctgcctcgcagtcacccgccccttcctggcgcctcggctgcgcagcccggccctggcccgccgcctgctgctggcggtctggctggccgccctgttgctcgccgtcccggccgccgtctaccgccacctgtggagggaccgcgtatgccagctgtgccacccgtcgccggtccacgccgccgcccacctgagcctggagactctgaccgctttcgtgcttcctttcgggctgatgctcggctgctacagcgtgacgctggcacggctgcggggcgcccgctggggctccgggcggcacggggcgcgggtgggccggctggtgagcgccatcgtgcttgccttcggcttgctctgggccccctaccacgcagtcaaccttctgcaggcggtcgcagcgctggctccaccggaaggggccttggcgaagctgggcggagccggccaggcggcgcgagcgggaactacggccttggccttcttcagttctagcgtcaacccggtgctctacgtcttcaccgctggagatctgctgccccgggcaggtccccgtttcctcacgcggctcttcgaaggctctggggaggcccgagggggcggccgctctagggaagggaccatggagctccgaactacccctcagctgaaagtggtggggcagggccgcggcaatggagacccggggggtgggatggagaaggacggtccg

SEQ ID NO: 10718 - DNA, 1663 bp, Homo sapiens
  source 1..1663: mol_type = unassigned DNA
ccgcctcccggcccccgccccccgctccccgggtggtgaacgcctgaagagggaggcgtggtcccgcgcaccttgtctccggccgcgccaccggcactcacctggctgctgccgtgctcctcgcccgtctccggggcccgagactccgcgggactccgcgccggctctgcgggaggaggcggcggctccagcagctgctccaggcaggcggtgcccggcagagaggagctcttctggtggcacaagtgcgccccggggccctgacgccgtgcaccctcatctcgggcgcggtcccccctcgggggaggctggggcgaggaggacagggaggatgaggcggaggaagaggaaggagctgagtcgggggagcgtccgccaggaggcgtccctcccgctgctcccgaggccgccgcgggcccctttacggcggggagcaaatgctcgcggatccggcggcgtagcgtggacccctgctcggctctgccggcgccgccgggctccaggggctccggcgacgagcagcacaggttgggctgcgaggaggagaagactcggtccagcacttgcttccgcttcttgaagccgctccacctgctgcctgcaccactccccctggccggtgcattccctgtgcccaccgggggtggcggggagggcgacggggtgtccgcagtgcggcgctctggacccccagcgcgcccgcccccgccgcccttgctcctgcccacccccagctgcaggttcttccagagccgggcctggaaggaggaggacgccgccggcggctctggctcgcccgccgcggcagcccggggctccatcctccaccccctgctcctcctctcccctcctcctcctcctcctcctcctgcttctcctccctcttcggctgcacctcctcccgggtccccgcggcgctggcggtggcggcggcggcggcggcgggcgcagcagcagaaaccgggagtgcccagcgacttcaggccagctcgggggaaagaagcggccgccgccgccgaggctctctggcctcgggactccggcgctgcctcttcctcccgcacctgctggggtgggctggagccgtaaccgaatcccggccgcggcgcctgcaaagtttttccctcgaagctccgcggctccagtccactggcgtcccccaggccgcgccctggctccctcttctctctgaccgagctcgggaagctgcacgcaccggggcgtgcgcgtccagctgcgccagggaccgcacccggcgccctctgggcagcacctgtcagcggcgggggcggctgcctccaaattgggcgcgcacgcggctcacacaacaaggcgcgtctggctggagactccggggaccagcagtccccctggggcgccccgggaccatcctccagctcctaggtgggagggccggtaggagccgggtggagctaggtagggcccgaagccagcttgctccctaggatccggccacagttgcccaggcagctcgctgtgcgctggccgctggccgcgctggcgatcgtctgggtcggatgaagcgagctggagtggaaactatgtgccctcgatgggtctcgtgggggcgccgatcgtccacactgagcgatgaacccgacggagttctaaagctgaagacgtctgcccccgccccgttgcg

SEQ ID NO: 10719 - DNA, 2065 bp, Homo sapiens
  source 1..2065: mol_type = unassigned DNA
gcggaccgcggcgtccctagggaacacacccacctagcaaccgagaccagagctggagcgctgcgcctttaattctggggcgggcggggggcggcgggaatttctgctccggttccctctgcatcgcgggggcagctgtcacctgtaaggcgagcgcggcgcgggggatggaagcaggcgcccattggacagaatacaaaggcagaaacctaccccgaaggccggggcccggcggggcgctgggggtgggcgctccccgcggcccccggcgcccttcgccccgagacgccccggcccagcggcactggcgcgaccgaggtccagcttcggggacacgcccggctggccgcggggaaggcaccaggtgagcgcggccgcgcctcccggaaccccgctcccgcgcgtcccgcggcgacgcggcgcccacccgccccgggagccaggaacccagggccccaccatggcgctggccgccgccgccgccgctgcggctgccggggtgagccaggcggcggtgctgggcttcctgcaggagcacggcgggaaggtgcgcaactccgagctgctgagccgcttcaagccgctgctcgatgccggcgacccgcggggccgcgccgcccgcagggaccgcttcaagcagttcgtcaacaacgtggcggtggtgaaggagctcgacggcgtcaagttcgtggtgctgaggaagaagccccggcccccggagcccgagcccgcacccttcggccccccgggggcagcggcccagccgtcgaaacccacttcgacggtcttgccgcggagcgcctctgccccgggagctccgcccttggtccgggtgccgcggccagtggagccgccaggggacctgggtctgccaacagagccacaggacaccccgggggggccggcctccgagcccgctcagccgcccggggagcggtccgccgacccaccgcttccagcccttgagctagcccaggccaccgagagaccctccgcagacgcggccccaccgcctagggccccttctgaggcggcatcgccctgctctgatccgccagacgcggagcccgggcccggggcagcgaaagggccgccgcagcagaagccctgtatgctgccggtgcgctgcgtcccggcccccgccacgctccgcctccgggcggaggagcccggcctgcgccggcagctgtcggaggagccgagcccgcggagctcccctctgctgctgaggcggctctcggtggaagagtccggtctgggcctcggcctgggcccgggccgctccccgcacctgaggcgcctgtcgcgcgccggcccgcgtctgctgagccctgacgccgaggagttgcccgccgcgccgccgccgtccgcggtgcccctggagccgtccgagcacgagtggctcgtgcggactgccgggggccgctggacccaccagctgcacgggctgctgctgcgcgaccgcggcttggcggccaagcgcgacttcatgtctggcttcacggccctgcattgggccgccaagagcggcgacggcgagatggcgctgcagctggtggaggtcgcgcggcgcagtggcgcaccagtcgacgtgaacgcacgctcccacggcggctacacgccgctgcacctggctgcactgcacggccacgaggacgctgccgtgctgctggtggtgcgtctgggtgcccaggtgcacgtgcgtgatcacagcgggcgtcgcgcctaccagtacctgcggcccggctcctcgtacgcgctgcgccgccttcttggcgatccaggcctgcgaggcaccacggagccagatgcgaccggtggtggaagtggcagtcttgctgccaggcgccccgtacaggtggccgccaccatcctcagttccaccaccagtgcatttctgggcgtcctggctgacgacctcatgctccaggacctggcccgaggcttgaagaagtcgagctccttcagcaagttcttgagcgcctcgcccatggctccacgtaaaaagacaaagatccgcggtggtctgccagccttctcagaaatctctcgtcgacctactccg

SEQ ID NO: 10720 - DNA, 3487 bp, Homo sapiens
  source 1..3487: mol_type = unassigned DNA
tcgagagaaggtgagctcggcgggcgcagcgggttgggtgggtgtggcccgcggctccgggaacagacccaaggccccgccaccgccggctagcagcccgacagcccgcccgcctggcgagcgcaggctcttcttccagaaactgcgaggatccgagcgtactgtttgtgcaccacaaggtcaagtcgggaagtggagccggaggaggaggggcgaggaggcgaagggtggggagaggggcgccccgcttcctcgccatgtgccagcctttggaagttacccctcggtttttaacctttcggggtaatgggaaggaagagcaaggaggaaggggtcgccccggggcaaaatcctgctggggccaggatgtgcaaccacccacccacccgctcatcactgccttctccaccccccggaaatgcggggcagcgctaggcgccaggaggcacccgggaggggggagggggcgacgagcccaatggggaccctctctacggaccgcccctcttttcttgaggtcgcctacaatttcaagttcccccgcccggaatgttagttttccatttggagtgggtgcggggaggagggccgcgccccctccccaagactcgcgttcgcccctccactcccctcctgccagcactttctgctcacttctggtgctgcaaaacgccacgcaatttattcgattcgcattttaaaaccagcgattcagaagcagggcctagggcgagggtcttccagcgctggagccccggggggcggggtgctcagtgcaaacctcgttccctccgcgagtgtcgcctccaggctgttatttgcaaagaaacgtctttttgacgcagggagaaatggcaaattttaagtacgtcattaatatggcgccaaaagatttttttaagtataagctcgcttttttttttttttaaggttgcggggggcgccgcccgggtctggggcgcgtagggggcggggtgtgagcagaaagtgtgagtgaaagagtggaggggcggggtatgtgtgtgagtgtgtgaagtgtgagcagacctgatgggacttgcacgggcgcagccgccgctcgggcccggccctggggacagggcgggctaggggcgccccagagtccatggggagtccgggcccagggtgccagcaggcgtggtggtggggctgcgagggagggcacccttcccccacggggcccgcaacgctacctggactccccgccggagccaaacaactgggcggggggttgggggggcggcgacgggggtgtcgggagcggagatccgagtgaataagaaaaaagtggctactccccctccctcgctcctcctgcccgcccccaccccacccccaccccaacacattttttttttctaaagagatcacaaggaagtcttggtttaaaaagaaacagaaacatacacagggggttggtgaatggtgccgaccgcggccatcgcagttggaggctattttttggggggggtgagtagcgtccatggagttactttgcgcccactcctagcggcaccggcttaggtcctgcgggccgaccgtccccggcggggggcgtggggcctgggacgccgcgggcccggccgcctccctcgccgcgaccccggatggatgcgcgccccccgccctcccgcgccggccccaggagctcccggcttcgggagcatccttcccgcgccggtccctgcagcggcgcgtagccgagggcagcgcccgtcaggggggcaccgcggagcaaggtaagatccagcccccggcggatgggccctgcgcatctccacgacgttatttggcgtttttgcaacagatctgccagcgctcttcgctccctcgctctctcttgctcgctcgctccctctctctcctgctggctgcctgttctaggaagccagcgcggagaggggggggatgcacagcacaggggagagagattgcgcatgttggtcagtcgtgttttaaagagtacagtgcggggaggctgagaggggcgcatgcaacaacaacttttggaagggtgagcttggcgaccttctttattaatgactgcggcaaagcgcccccgggccggcgagggggcgcgggcgggcgggggcgcgccagggctgcaacttccccgcgggctccggccgggcgtaggggctgcggcgggagatgggtacggtggggaggtcgagcggcccgggcgggggctccgagaacctggagctatctgccctcctgtctccccgagtttcattttgttgatacgcagcacgtccgggcgccgaaccgggctgagccggtgcacatgacctcgcgctgggctcacgtgcagccggtccggtcccagacaccttccgggggccaccgcctccgccctgtcgccccctctcccggcccggtgcacgcgggcgctgcacgcgggggcagcatgctcggctcctggggttggaggctctgcacaaattagacagtttttttggaggggcgggggacaccctttccaggtgagtgtggagggtgcggagcctcggcgccaggggtgaggactggggtcgggggcagcctccacctccggggccgcgcggtagtccagctggggagaggcgctgggagagtggaaatgtaccggcggcggccggagcggcgggtgcgcgcccgcggggcgacggcagggggcgtggcccttgtttaccttctcccaactctgccggttcgcgtcccgcttcagggacggatccgcagtccccagccctctgcctagggccctgcaccatgggtggtaccaggaagatgccggcttgtggcggaccccgtttgggacgcacacacctgactctcaaatgagtgacattgcagcccccgcccccacctagcgctgctgcagtccctttgccggatccccggccccgccccgcccccggcagtggcatcttcccggcctcacctccttcctccctctccctcccttcttcccacccactcgcctgcgcctgcggagcggcgcccgcccgcctcctccccgcctgggtgcagacttgtggctccccatggtttcttcccgcccatccctgggtcctgagacatcctctcctctcggccaagggacgagaggggtcaacttggcgattcgcagctgttctgccagaggatggggttgcctgcgagacagccaggaaggcttcactctagcttccagaggcccagccctgtcccctactacacacagctaccaccccacccgcccctggggctcggctgcccttcccggtgtctcttaaacccctcccccgacctgggtgttaagcccacccacctcccggcgccgcccccggtcgaacagcctcttgcccttccttcgcctgggccggagccccccgcagcctcctccggctcctcctcccggctccggcggtcggaatcacgccggcgcgcctccagcctgcggtcccgcggactgcctccaggggcgggctggaggcgcgcg

SEQ ID NO: 10721 - DNA, 847 bp, Homo sapiens
  source 1..847: mol_type = unassigned DNA
ccgaggggaaaggacggatctggcgcctggggccccctcggtgggacccaggtgggtggcccgcgtggggtggggcaggggtactcacaggcgctcagcgttgcgggggatgccccgaggaaccgcgcggaggcccagcccgtggcagtccacgctggcagcggagcaggtacacttggtggggcaggcgacggctggaggcccactcaggacgctcgccagcgccaaggccagcgccaggcgggcgcgcacggcggcgccgacccctgcccacccgggggccatggtgtgcagggccccgctcctggaggaggctgcctctgcggggcaagacgcgtggagcccgaggaggcgcgcggggagcgcgggcggcctggggagcgggcggcggagttagcgcggaggaggggcgagctcggtgctcaggcgcacggggcgcgggcggagcggggcgctccgggcggcggcggcggcagcaacagcagctccatcggcggggccggcgctgccccgctgcgcatcgctgggagtgcccaggtgcggagcgccccctggccccgctggcccgcgggccgggttggggacctggggcgagcgcaatggggcgtggcgcccggggaggtccggcttggggctgggctggggagcgcggcggctgcggctggggcacggggcggccgggtgagctggccggcgctcgctctctccattcagtgagcacggcagacaccggagacgcggggcccacccctccggcccccccccgaccaagaaacgccaactccgcctcccattggctgcgccgcgcgtcatgtcgactaagttgggaactttgctggagcgaccg

SEQ ID NO: 10722 - DNA, 909 bp, Homo sapiens
  source 1..909: mol_type = unassigned DNA
ccgttcagtatagacggggtactcccggtgcggcctgtcaccgctctgtctggcgctggcgctcctagagaaggccatgccgacctctcccccacctcgctccagattccccttcttgagctgcttttcccacagtccccccaggcgccactgagagcctcccgtcttcgatgggcttggggcgcctggacccttccggggtcactttgccgtcttcctccagcccccctccctactccttgtcgccgcccccccgtcttttcaggaccttgcgcactcaggctggccctatgctttggggtaccccagcagtgcccccgggtctccggccacccggtgacggagggagggagaggctggcgagggggcggcgccttaggtcccagcgcgacccgcctctcagcccctcccgccggctacagccgcgcgggacggggcagggacctcgagaacaccggggacttgcgggccggtggccccgggcaggccacttctgacgcgggtgcgaggccttccgcgggcgtgcacggttgggccggagccgcgccgggggccgggacacgcctggggtcagcgctggcgtcgccgctcgggtggggtgggccgggttcgggtccagtctcctccccacgggcggcccgcgccccgtcttccagtgacccccacatcccttgcgccccgagctggaacttcggcaggttctgccccgggccgcgcgcgctttctggggaccagggctgtggttcctgctccgcgtcgtgcctttagacaccgccgggcgttcgtcctccatccctccccccttttccccactccgcggttgacgagggccgcccccaagtggccatgtcccccggcatggacgacccctcagtgcccctgagggcccagggtctcgcccccgtcccg

SEQ ID NO: 10723 - DNA, 2150 bp, Homo sapiens
  source 1..2150: mol_type = unassigned DNA
acgccgcgtctcgccgcccgcgggcccgccgggagactgcgggtccgtctcgcgggtggggcgccccggtccctctcgtttcctggaggccacaggtcacggcgacggcggtgaccgggagagcaggctgcgaggcgcgcctcatcgggccacagacaaaccaccccggcagcggccgcgccggaacttccctcaagttaccaaactcgcctacgcgcgggagagtgctggggatgccccatgcgcccgcgaccccagaagccaggagtgtgccaccccttcacacactcactcccggccctgcacgcttcccctcacggtccgagttcctgcaaatgcttggccagaccgaggtcgccgagatgctcgctccagtctctcccctcgtgggcacctagggtagcccgtgagcgccgcccgccgccgtctccagcggcgccgggctcccgaacacccgccgggtgagcgaagcacagcggggccacggagcgcctcgacgcggggacggggagggcagtgtccccttcataaaccagtctcctgggtgaagcttctggggcttggagactggagtgtagggtgtgtgtgtgtgtgtgtgtgtgtgtgtgttgcaccttgacttcatggaggatctgtgggagaggaggtgcaaggtttccctctcagaagcctggcgcccttaggtcttagctacgcgggacgctttccgacaacccgatctttcgctaggagagattcgatccaggtctgcgccgcgaggcccccagctcgcctcttcctgcgaccctaaacttgggctttgattccccgccggtcgcggtggtccgggccacccggcggcggctgacagctgagcgcaaaggcgccgcggccaaggtcctcgcggagcagcccgggatgcgcacgccgagggttaaggaggaggccgcccggcctggagctgggatcgcaggctgggggccgggacacccgggcctcgccgggccgggggcagggccgcgggtctgacagctgctgcggctcgcgcggacgcgcgcctcctgcagcccgccctccccatgcctgacttattactctctgctcctcctccctctgctgttccaaaacacccttcgacgccagcaaaatacaatgcgcctcggccgccgtaaacagccgggagggagagcacacattcggcgcggcgcggccgccggctcggctcccacccccttcccgttcctagaaaatgccataaaagcgggcagggcgcggggagggcggctgcgcgcccggcggccggggctcccttcccgcgccgtttccccacgcctccccgcccgccccgcgcgcccgctccccccgcaaacttgccccgccaccccgcccagcggcggggcccggggcccggggcccgggactcacctcgccggagaactttgcgtccttttccgcctcctcttccccgcgtcttcccggctcgcagccccctcccggcagccggcgaggtgggcagttcgtgggtcaccgaaagctcgcggaggggacgcgcatcacatggcagctcgttcccagccccccgagtgcgccgggaagggggaggggaaggggcgaggggaggccggggggaaagcgagagcggggcggcggcgggagtgggcaggcggggtggcgagggcggcggccgctcacgttagcgctgtgcgaccgcagcccgggcgtgcacggccgctgctgccgctgctgctgctgctgctgctgctgaggcggcggcggctcggcgctgtttgctccgcgccgcgcggcttgcgctctccccggaacgcccacactctcaatcgctacattgttgacattcggcgctgacgtcacccgctccccattcacaataactttacgggagccgggcagcgcacctccccggccgctggggcgcggtacgcccggcgactagcgtaagccgctccgcgaatggcgctccgggggctggggcggggggcgggggacgggggcgggcgcgcgcgctccgctggctcgcgggagggggcgcgcctcatgccgccgcagcagcagatctccccgctttgtgcggccgcgcggcccggagagccccctcctcccggcccggctgaccgccccgctcggcctggccttcccggccacgaaagacg

SEQ ID NO: 10724 - DNA, 506 bp, Homo sapiens
  source 1..506: mol_type = unassigned DNA
gcgcccgctgtccccgagctccgggcctgagtgctggctggcggagacccacagtgggtgccccgctcccggacgatgcccctgggcttccagatccagagcctcgggacgaaactgtttcaggaagacccggaaggactcgccggtcgcggcaagggacaggcggttcctgagacaggaggagccaggaaatgcggggcctggtggggtgaggagcacggggttcctccttcatcctcgcggggactttgccaccggctcagtgtggaggcctcaccgtcccgcccggatccgtggggctccgacagtgtggcccctgcgaggaccccccccatcctcctcgccctggggctgctgcgggagggcgcccgggcagcactaggtcctgagtgtccagggtccggcaggggcttcccgttgtcgcctccctgaccccgccgcttgcggtccagggctgctggtttctccgctggtctgggaggccctagcatggacgtcgtgaggcg

SEQ ID NO: 10725 - DNA, 1503 bp, Homo sapiens
  source 1..1503: mol_type = unassigned DNA
ccgagtgggacgaactccccgccagctctgggcctccccacctgccggcccgcggtcggcgccggcacaggcggagggcgtcttccttcccctgcggccccaagccaagtggaagacttttctctaagtttccctctccgaagccccgcgggcctcccgcgccccagccccagccacagcctgtggaggcggcaccccgaggttgggcgcccgtgcggcgccttggccccagcaccccccgccccgaggcccggccccgggggcgcggccgcccgggcctccgtgtgccccagggggctccgggccgcgagccgctgccgaatggcttttgacaaaaaaacccttgaccaccaaggccagcctcttcctgaaagccccgctcgctccgatacaggaagtagaagggagcgagagccccagagcgcggcggcagcggcggcctggcccttccagagggccagagccagggacatgcgggcgcccgggactccgcgttccgcgcggcccggcgcctgagcgcctccgttccccgtcccggagctgccggcggcatgatccgacacgccggggcgcccgcgcgcggggaccccacggggtaagtccgggcggccgccccctcctccctcgcgatccccacggcccgcgtcctggccgccccactccacttcttgtcccagagagtccttcgggcgcgtgacctcggggttgtcgggctgatacgggacccccaccgtggccgaggccagaacctggttctgcggggcagggggcggccctggtgactccgctggacccgatgttggctaaactttcaaggccaggcatttcactgggaacccagtgcacactttaggctgctggtggacggattacgagggagtgcgtcgctacctgtcagcgccggggctgcccgcgtggacgcggccccctccctggcgtctgccccgcctgaactttgcaaacaaaactcgcggtcccagccccgccagcctgctgcacccgctgctctgcgagtcgcagcgcgcgccctcgggtactagagccccgctgggcgtggggtcggagacccggacccccgcaactttgggtgcccgcggcccaacagctgaccggccctcctggaccgagggtccactgggcccttttcccgccgcccctctgccctggccgtagacggtgaccttcggaccggccctggtcgagcctagtgcttgggtagggtccagggcgcacgggctgcgcgcgggctgtggatgcatgacgccgaatggtttgggaactgacttggagaggagtccccggtggctaagtccccgctccgcctccttgtcgcccccagccccacctcgcgagctcgggcattgctcggggctgggctctgggagaaagtcctctcgccttgcccagctcagagggcgtcctgagaagcttcaggtgttgtagagacgcccggtcggaggcggattcccggggaaagcctatttctgggtacccaggagcgcg

SEQ ID NO: 10726 - DNA, 907 bp, Homo sapiens
  source 1..907: mol_type = unassigned DNA
tcggaccggcacagggggacggccagacgggatgtcggaagccaagggacgcagaggccggcgggtggcggcgatggagaggacagatccggctcccagaggaggtcgtgagcgcggggcctgcgccggccggaggagggacccggggggctgcaatatggctgctcgggcgccgtcccctccctgccaagccagggctctggggagctgctgccgcttcccgctcgggctggggcgaggaaaggaggggacggcgctgcggcttcggaatctgtactgcgactttggcagagtaaacgctgcacttgcagcttcgaattgaatttcctgcctctcccccctcccttccctggccacgctcttccctcctcccctcactattttaccttaattggctctaaacgagggtgaaagttgagtctgaggatgccgctgccatagaaactgcatagcaaccaagggctggggaggcggggggggggggcggcaggtctttcccccccacccccagcacgcgcacacccttccccacctccccagcccgccgcgcctccccggagacccacaccgccacctcccgccgcagaacgggagggacaggaacacggacggagggaccgggacgaggggagggctccacgcagcacagctgctttcctgcggagcgttcaggagactcgggcacctctggaagcgctgcggactgagctgcccgcggctgcccccgccccgagggccgggacagcacctcaggagaagagggacgaagagggacgacagacaaatagctggggagaggcgggggggggcggcccgtggggtccgctgggccctacccagccctgcccggagctgcccgaaacagcactcaggcctctgcgggccaggatgaaaggcacgtgggccg

SEQ ID NO: 10727 - DNA, 1925 bp, Homo sapiens
  source 1..1925: mol_type = unassigned DNA
ccgtcggccccaagcaggaaggcgcccccggcacaccagcccctctcagcgcccccagcgggcccggcgcctggagggttaaggcgggcgcgtcccgcgggtgggcggggggggggggacgggaccggtgccgggagctccgctgccctggcgtcccctgggtccaggcccagtcgctccttgggcctctctcgcggggccgcctccgcctcctccttgccgagacgggcgtggggcacggggtcgccgcccggcggggagctcatccggcggcgcagacgccccgcggctccggggagggacttggcctgggccccggccccgcgctcctctggggaggagccgagaggctgcagctggcggcggcggccccgggcgggagggggtcccaggaagcggccaggccggagccccccactcggccgcagctgctggcctggccagaaccgagcgcgccctcccggtctccgccgcttccctctgcaaaccgcgggcaggaggagccctctccttagcgggcccggagctcagaggcgtcgcggggcgcggccgaggggaggaggaaggagagcgggagcgcagccggcccgggcccagccgtgactcgtggggcggcggctccgccaatctgtgggcgctgacgcggggggcggctccgcggcgctcgatatctgcccgcccgggacgcggggcgccgagaggctcggccaggcgggagctgcgctcggggcggccgctgcacctgcccgggaccccgccggccgctccccgcgcccaccccttccgcccttcgccccccccttccccccagccccggtctcccgggcgcggcgtgagagcagagcccggcccggaggagccgccccttccccgcccgcccgcccggcgcctggagaggagcgcgctgaggatcgggacgcctgcggccgccgccaccgcccaggcccgtcgcgccccggccgggatggacccacacgcccgatgagccccgcgccggcggctgcgagcgccgagcctccccctgctgcggccccagccgccccccgcgcgcccggctccgcggaccaggacccctgggctccccggctgagggcgcggccgctccggagaggccgagcggggacgggcccgagatggcgcggggacccagcgctccggcggcgggcgccctgcacgcggcccgggcccggggacagccccggagctggtagccgcccggcaccgatggaccttgacccgcgaggcggcgccgcgctcgtgcccagctgcagctagaggggcgcgcgggcagaacgcgctccaggcccgggccggcccgcgcggccatgaagatgatgctggtgcgccggttccgcgtgctcatcctgatggtgttcctggtggcctgcgcgctgcacatcgccctggacctgctgcccaggctggagcgacgcggcgcgcggccctcgggggagcccggctgttcgtgcgcgcagcccgccgccgaggtggccgcgcccggctgggcccaggttcggggccgccccggggagcccccggccgcctcctccgccgccggcgacgcgggctggcccaacaagcacacgctccgcatcctgcaggacttcagctccgacccctcctccaacctctcgtcccactcgctggagaaactgccgcccgcggccgagccggccgagcgcgccttgcgggggcgggatcccggcgccctaagaccccacgaccccgcgcaccggccgctgctgcgagaccccggcccgcgtcggtccgagtcgccccccggccccggcggagacgcctccctcctggccaggctgttcgagcacccgctttaccgggtggcggttccgccgctcacggaggaggacgtcctgttcaatgtgaacagcgacaccaggctcagccccaaagcggcggagaacccg

SEQ ID NO: 10728 - DNA, 1287 bp, Homo sapiens
  source 1..1287: mol_type = unassigned DNA
ccgtggctcggaagtggaccctgtccgacgcgggggtggtcgctggagggccgaggatgcctacacaggcccctggagggtgtgccttcggagtctgtctcgccctctggacccatgggggaccagcaacgccgtcacaccctcctctgtctctgccagccgctcccccgctcccttctcctggctgaggctggcaaaggcaggcaggcatgggggggcggggcctcaggagggaggaggggctggtgggcggggcctacggacacctcgccccgcccccagtggggctccgcactccccacaccccgcggtccccctaggtcagggcctctcaccaccgcgcccagaggccgggccagccgggcgtgcatcccaggggcgctccgtcccccgcggcctgggactctccagtcaggacagtacaaaatctctttatcgctcattttctgtaaaaaatcgtggctctcggcggaccctggagataggaggtgcaaagggcgctcacacgcggcccgggtccgcggccgagagctggggggatctggagcggggccgggtcgcaagaagaccctgaccctgctccggcgctggggcgcgtgctaagggcccgcggggtatcagctgtattttcgaacccctgtgcttggccggggagttcccaaggctccactccgccttggagggggctgcggaagcccggaggtgacccgggctctgggaggggcgtccccaacgtgggggaagggagacaggggccttcgaagacagcgcgagactcggagggggtccccccgacctaagacgtggtaaactgaggccggcgaggagcgaggctgagtccggggaccaggcggcccctcactgctcctccggcccgtcgcccccctgcgcctgttcgtacgggcagggccggcggccgagtccagcgggctcggggccaggcctgggccccgggggcggcgcctcctcctccgcgccgtccccatgctcgccctccgcgtcgctctcgtccgagttgtcctcctccaagtagccgtcaccgcgcaccttgtgctggggccgcgggatgcggggctggcgcggggccacgccccgccgcagcttctgctccatccgcaggtaggagaccgcggccaccaccagcgtcaccagcagcaccgccagcttagcctgggcgtaaggagagggatgccagggacccgcggccgcctcgccccgcaccttctccgcctatacccctcgctgagataggcccttccctcctccgggagcctcccgggccacgcg

SEQ ID NO: 10729 - DNA, 2906 bp, Homo sapiens; identical to SEQ ID NO: 5279
  source 1..2906: mol_type = unassigned DNA

SEQ ID NO: 10730 - DNA, 2146 bp, Homo sapiens
  source 1..2146: mol_type = unassigned DNA
tcgcgtgccaggaaaagctgtgaggctggaaaccccggagtaaggctcgaccttggccagacctgcaggctgcggaaccgggggcgcgcgggcgcagcgcagcacagcccggccatggagcacgcggtggccccctgcgtcctctacccagggactgagcccggggctgccggggagagcgagagcgagggcgccgcgtccccggcgcagacaccctgcagtctcggcgcgtccctgtgcttcagctccggggaagagtccccgccgcagtccctcgcctcagcggcggaaggcgcggccacctccccgccctccagcggtggcccgcgggtggtggagcggcagtgggaggccggcagcgcgggcgccgcgtccccggaggagctcgcgtcccctgaggagcgcgcgtgcccggaagagcccgcggcgccgtcccccgaaccgcgcgtttggcttgaggaccccgcgtcccccgaggagcccggggagcccgcgcccgtacccccggggttcggggcggtgtacggggagccggacctggtgctggaggtgtcggggcgccggctgcgcgcgcacaaggcggtgctggcggcgcgcagcgactacttccgcgcgcgcgcgtcgcgggacgtgctgcgggtgcagggagtgagcctgacggcgctgcggctgctcctcgccgacgcctacagcgggcgcatggcgggcgtgcggcccgacaacgtggccgaggtggtggccggcgcgcgccgcctgcagctgcccggcgccgcgcagcgcgccaccgacgccgtggggccgcagctgagcctggccaactgctacgaggtcctgagcgcggccaagcggcagcggctgaacgagctgcgcgacgccgcctactgcttcatgagcgaccactatctggaggtgctgcgcgagcccgccgtgttcggccgcctgtcgggcgcagagcgggacctgctgctgcgccgccgcctgcgcgccggccgcgcccacctcttggccgcggcgctcgggccggcgggggagcgcgcgggcagccggcctcagagcccctcgggggacgcggacgcgcgcggggacgcggccgtctactgcttccacgcggcggccggagagtggcgcgagctgacgcggctgcccgagggcgcgccggcgcggggctgcggcctgtgcgtcctctacaactacctcttcgtggcgggcggcgtggcgcccgcgggccccgacggccgcgcgcgcccgtccgaccaggtcttctgctacaacccggccacggacagctggagcgccgtgaggcccctgcgccaggcgcgctcgcagctgcggctgctggccctggacggtcacctctacgccgtgggcggcgagtgcctgctcagcgtggagcgctacgacccgcgcgccgaccgctgggcccccgtggcgccgctgccccggggcgccttcgccgtggcgcatgaggccaccacctgccacggcgagatctacgtgtccgggggctccctcttctatcgcctgctcaagtatgacccgcggcgcgacgagtggcaggagtgcccgtgcagcagcagccgcgagcgctcggccgacatggtggctctcgacggcttcatctaccgcttcgatctgagcggcagccgcggcgaggcgcaggcggcggggccgagcggggtcagcgtgtcccgataccactgcctggccaagcagtggagcccgtgcgtcgcgcccctgcgcctccccggcggccccacgggcctgcagcccttccgctgcgccgccctggacggcgccatctactgcgtgagccgcgcgggcacctggcgcttccagcctgcccgggaaggcgaggccggcggcgacgcaggccagggcggcggcttcgaggcgctgggcgcccccttggacgtccggggtgtgctcatcccgttcgctctcagcctgcctgagaagccgccccgaggggagcagggcgccccgtaggccggcggggtcggcgggcgtctccctcggcaggggtttgcggggcccaggtccctttgggcccgcggaggaggacgtggtggggagtcggggccgctggccacgctggtggtttggacacttcgaaggagccccgaggacgctctcagggccgctttcg

SEQ ID NO: 10731 - DNA, 865 bp, Homo sapiens
  source 1..865: mol_type = unassigned DNA
gcgccctgcgtttcttccccacgtcacttgccagggagccgctaaacagcaagaccgcgcgctctgcggctccagagtgcggatttcggtcgcgtgcggctctgaccgcgtcgccccatccctggcggggccacgcacggacgccatggctggcgccgcggagccgggcgatgcgcgcggactctcccggggccctgactgtccctgagtcctccctgcggggggcgtgcgcggcccgccccccgcggcgccacgcggcccctcctcggccggggattggtgcgccgggcggggcggggcggggcgggataaaggcgcggggtctggctgcgcggggtctgcgggcagctccaactctgggttcgtagtttgcgctgggtgcgcaggaaggtcagtgtgggggtcgcccgacatttcccccccgcggaggtgggagccgagccacatcttggagtggggactggccgcggagcgggttgcccagggccggccgaggtcggggcgagccctgcgcggcgctggagactctgcattcccgggcgcgcgcagggtccccggccgtggtcgcagagtcaggaggggcggctccggagcccggcgcggggagggcccaggcgcagtcggggttggcagggcgcgacactcgctcccctccacttttgaaagggcttcccacgccgagaagaggggcgggcatggccggcccggcgaaaccggtttgtacagactttgggaagccatcgcctgcggagggtgggaccccacagcttgtccacctgcccaggctgagacctcgtgtcctagtcctggatgccccacgggtttctcgtcccgggcagcggcgcacgggaggagaagactcccg

SEQ ID NO: 10732 - DNA, 865 bp, Homo sapiens; identical to SEQ ID NO: 10731
  source 1..865: mol_type = unassigned DNA

SEQ ID NO: 10733 - DNA, 1463 bp, Homo sapiens
  source 1..1463: mol_type = unassigned DNA
tcggggggccgcgggacgctcaggaagcgaagcggggaaggctccgggcgcgtcgcaggacccgcgctggagatgggtttgaagccctgtcctgaaaaagccggcccggagtgggctgtccccggtgtccctcgagttctcatgctgtcattcaagcagcagaggaagaaccgggtctggctcgggaagggtgggcttagggccaggggtgcaaatccctcggtaaaagccggcaaactaaaagtcgcacacatcccaggtcccggtccaggccccggcggggcagggtccccgaagtcccggggcgcgcagacgccggggcccccgggggccaagggaacggcgggacccgacctccctgccctcggcctcccgggccctcgccctccgaccagccgctgagtcgggggctggggtcgccgcttccgcccgcggcccgctgcccctccccggcgcgcgccatccggccgccggcccctcctcccgcggggggctccgtcccgcgccccgtccctccgggctgcagccggcagcccacgtccagggagggcggagggaggaggagaggcgcggagaggagggaggggagaggggagggaggaaggcgagagaaagggagctgcttccatcccggacttcccagagcctgcctggagcgcgtactcagcggctctcgggtcccagcgtcccagccgcggcccgcgctcctccgccccgctcctcctcctcctcttcctcctcctcctcctctctaggcacccccgtcccctccttccagcggctgcagcccccagccccaactctccgcgcttactcctgggacgcgcgtcctcgccccatcctttgcttccttccttccttccttcttccttcctcccctggctcccgccctccctctccaggtcgccctcccggggcccgattgtctcggtgccccgctcccggcccgcgccctgccccgtctctcccttgcacttcctgagtcgcccgccgccgccgtcgcagactcgccgcgggagccccagcccaacccgagcccgacagccactgccccggctccagctccagccccacagcccgcggcgcccgcccgagggagccccggcgcccggggaaggctccagtgggctagcgcgccctcgcccagccccgcgccccagccctgcccggcccggcgaggaaggaccgggaagatgaacaacggcggcaaagccgagaaggagaacaccccgagcgaggccaaccttcaggaggaggaggtactgggcggctcggtgtggtggcgggggcgacgcgggacccagtgcgggcggccggcggggcgcgggcccggggcgcggcggtggaagaaggttcaggcatggcccgtgccccggacgcagccccacagtgtggcccggggagggtggatctcgggagcgtgtgtttttgtgtccacgcgcgtctgcgggccccaaattgcg

SEQ ID NO: 10734 - DNA, 1437 bp, Homo sapiens
  source 1..1437: mol_type = unassigned DNA
tcgcaggaaccgaggagccggccggcccaggcctccaaggtcacggggagggggtcagggcggaaaaggcagtggagtgagggtgccgccctcgggccgtgctaatcccgctccgctccgtgccgccgaggcggggtcctggccacgcaggaggtgcgcctcggaggagggcggcgagcggctacggggtggggagcaaggggcgcgcgggcggcaggcatggaacggacgcggcgcatctcgcccaccgcgggacgcccggacggcggccggcgcgcgcggcccgcctcgagcccgagagggcggggagacaatgcctgtccggcggggcagtccaggccgcacgctcccgcccgcggacacgggccgctcctacccgggcgagagggcagcggcgggaaggcgccgggagcgatggccaccccggccccgcgaggcgcggcaggccccgctcgccctctcccgcgcccgcctggcgtgcgcttcacccggcaagtcccggggccacagacccacctcctcctccagggcgccgccggagcccgcgccggagccggtgccggtgctgccgccgtgctcgccgtccggcttcaggttgctcatggtgcgggggagggggcggcgggaaggaacgcgagggcgagcgcggcgccggccccgcgggaagtgggaaggggcgcggggagcggtgcgctcgcgggtgcggagcgggtggcgggggacccacggggcagtgagaggggcagcctccgcgtcgggccagggtcacatcaagtttggcgggtgcggaaggtggggagggggtgcggcgggggaggcagtgggagccggaggggccgccgcctccgccttttcactgcgaccggcgagtgcgccgcggcggcggcggcggcggcagcggcggcggggggcgggcgccgggggagggggcgggcgccggcggcggggggcggggccggaaccggcctcagctggggcccggccagccccctcccccgcccgccgcgcggtctccgggggaacgcgcagccaatccccaccgcccaccgtgggctcgccccggccccggccgcggggcgccggcctccggccgggcctttcccctctctctcgcctgggtcagcgctctccctctctcctcttcccccgcgcccttctccacggcgagtttttaaactttgatgaactcgcccggcgaactttcttaaaggggccgcgcgctgcgcgccccagcccgcgggaggtggagccccgtgccccgcacccagcgccccggtccctgggcggccctgcccgggcggcctcgcgcttagggcacccgcagcgaggtttccgggccgtcgactccccttgtatcttgatctagggttttggggttcccgacgcactcattctgcccctaaatccagtcgcgcagacctcagctccgggggaccg

SEQ ID NO: 10735 - DNA, 717 bp, Homo sapiens
  source 1..717: mol_type = unassigned DNA
gcggcaggggcgggacccggaggcggggcgtttgctcacgtcgtccagtagcggagggaggcgcggtcccagctccgcgctcaggagccgcacaggcgcccggggccgcagcaggagcctcctcagggcgcccagcgctgcacccacgagccgcgcgtcgccttcgcccagtgcgcccaggagcgccggcagcagcgtgctcacgtgccgcacctgctgggactcggggtcagcctcttgcagacctcgccgcgaccgggccaagcccctctccacccctccccttctctcacaccttcctgcgattcagcgcgaggtggcccaggcccagcaggcccaaccagcgcacagtgggttcggggtctccctgccaggtgaggagtcgctccaggatgacctcctcccgcaggagccgtgcggtgggccggctctgcaacagctaggcgaggcacatggggtcagcacgcccgcggtccccgtgcaggccgctgcgattcagggatcaagtccagggtcacccttcaccacccatccgggaagcaggctcacccctgtgaagaaggccatagccgtgagacgctgcgggtcgtccgcgctgcgaagccgagggagcaagtctgcgaagaggcctcgcaggtggtggtcggcatgtgccaccatagcactggggtgggtggaaatgggagctctcgctccgtttggcggcctttctcctcg

SEQ ID NO: 10736 - DNA, 1713 bp, Homo sapiens
  source 1..1713: mol_type = unassigned DNA
gcgctgcagactcgggtttccttctcagtctacgcgcaagccgggttcggcccacacccaccacacccctccggtccccgcccagcgccgctcctcctcccgggcttctccagcaccgactcagcacctatcagcgccgcccccaggcccctggcccagcccatcctcgggcacgtgtgagtgtgtgtttgtgtcagtctgtcagtcccaccggggaccgggctcgcttaccgagagagaagcgctaacttctgctccagcatcatctccagcttctggccctgtttggagatccagtggtccactccgtgcaggcggtagcacgtctccagcatcaacctgaagtccgccacgaactcggtgatgcccccgtactggccgctggcgaacttctcttccatctgcagcagacacatgccctgtccgggctgctgcgggaaggcgcgaccgccccggcccccgctgcgcggcccttccgccacctcctcctccgcggtggcaacgccccccaagggctgcagaaagggggcggtgaggccccggtgcttctcctgcaggaactcgcccaggatgcggtagccctgctgtagctcgtaggtcagctcctgctccttgcagcaaccgcctccgatcaccatcgcctccatctcttcctcctgatcgtccgcgtcctccagcgaggaggcactccttccgtgggccggccctgaggtctgggccgccgctgccacctcctcctcgtcgtcctctccttcggccgccggtggcggccgctcttcctccccagccggctccatcgctcccggcgtcccgggcacactcatgccccggcaggcctaggctgggcggtgtggaacagccgctcgaggtgctgggggacgcgtgagcgcgagccgcttcctcacggctcggccgcggcgcgtagcccccgccacatcgggcctggctctcctcagccgccggctcggctcggtgcgcgcgggggtcttgagctcaccgccggcggggcggggttacatggcgcgcgaggaggggggagagaagaggagagcctaggtgccctcctctcccctcccccccggcggcggcgcgcgcacggccctcgccggcctcacccctccgcaccccgcccgcctgctcttcaccggccaggccctgccgggtcgccgcggcctcggcgccccaccccctcccgggccagcggggggctgggagggggcgaggaggaagggggttctcctctcccctccccggagggggccgcagcggcggctccggctcctcctctccctcacaccccctcccgcccccctctacctgcgggggacacgggcagaaggaggcggtgcacggacggggcccggcgacaactgtcagttagaagccccgctgggcggtgaggggggagaaaggggaggggcagggagagaagggggagggcactcagccccccggctgggaagagctgtggagagaagcaaagaaagaggccctgtcgccatccccggtgcgcatgcgtagtagaacaattcccccctccccccccgccaccatcgtgccccgccccgctacgcaaaaggaagagcttcggctcagctacaggcccagaagcctgctagggttgcgcggaccaatgatgtaatcaatcgtaggccaatcgaacatgttgatggagggggaagcaaggcgcctgcgcagcttaattcgctaccg

SEQ ID NO: 10737 - DNA, 699 bp, Homo sapiens
  source 1..699: mol_type = unassigned DNA
gcgcgctcggaaagccggcttgggtcctgctaattattctgaaggcaaagtacctgcactctccccgccgaggctggctggcggcgccgcgccggaggggaggaggctcgggaggaggaggagaaagagcagcgggaggactcgggctgggaggggagcgcagggttggggaggccgatgagcggctcccggctcctcggagaagcagccgagacggcaaggaggaggcgaggctctgtcggggcgaggcgctgcccccacgcgctccggccgccggctgcgggcgcggctgggcggggagccgaggcggccgctcccgcactcgctcgctcgctcgctggcgctccctcctcgtctcgctcgcactcacaggcacacaccccacgtctccagcagctgccgctcggcctcacgcactcacctgcatttccttaacgagccacttgatggctgccagcggcgtgggccccgctccggcgggcgggggccggggcggggagaacgcggcgcgggatgctccgagcgcccgctggggagagaagcggcggcggcggcggcgctgcgggcgcgccagatggggcgggaggaggggagacccggcacccaccggcccagagctgcctgacgcggcctgggcggaccccgccgcccgggtgcctaggcacgattccagggatccagggtaaagcggttcgcgcg

SEQ ID NO: 10738 - DNA, 1191 bp, Homo sapiens
  source 1..1191: mol_type = unassigned DNA
tcgacctccaccaagcggatggccaagcgccacccggaagtgtccactggtgggggcgggaaggcaccgtagtccaaggtatccgcgggcagggagcgggccagggcgtgcgcgaggtcgggggtagctgggaacggaggaggaggggcccgctcgaggctccgcctctcaccggctgcggcctcggctacagccagggcccagagggctccgagtcccgggagcggaggccggagtcgggttcctgtagaggctgctcctccttgtccccgctcggacgtggtccccgctgctcgaggtgcagctgcagcagggcccggcggtacatggcttccagcttctcaagtcgggccctcagggccctggggctgcccggctcgtcctctcggccgctgtctctagccctccggttcgtgctggcctcttcagggacccggcgtgcctccgcgggcgtcccgttgccgccttcgccggggagccgcaaagcctgacggaagaggctgcggttctcgcgcttcagccgccggttctcgagccgcagccgggcgttctcctgacgcagccgcgcgttctgccggtcccactcgtcccgcgcacggatggcctccaagtggctcgccgccaggtcggcaaaccgctcctccagctgctgtcgggcgccgtccgcgcggcctcgccagcccacgccgccgccgccgccgctggggctgcccccaccacgagcccggccggagcggcctggccctcggccgtccgcagcaccgtccccgccgcagcaactcccgcgcctagtggcgccaccacgcatgcgccacatcggtcccatcccaaccgcgccgccagccccgtgggctgaggggccgcgcggccaggcgcgggcaagttcggggctggcagggcggccggggtgacgacggaggaggagaggaggtcgcgggcggcggctgctggcttagagccaaaggaggccgggaatttgcccagactgaggcgtgtcctgtctcctgtggtggagctgccccctgggcctgctctctccaggctgcgctgacacacagttcccccggggagtgctttgctgttcagccctccggctgcgcgggaaaaagcgtgtatcctcagctgagttgtgccagggcgcttccgtgcaggcctgggcactgcaggaactagccgtcctcgcccgctccg

SEQ ID NO: 10739 - DNA, 536 bp, Homo sapiens
  source 1..536: mol_type = unassigned DNA
ccgcctcctacgtgctcgcgggggggggcggggtcggtggactgggcgtgagttaattggctggggggcggggcaccacgggttggctccgcccaggcgctcgcgcggatcccgggtggaatgacgggagggagtcccggcagctcctacctcccagcgatggcgtcgctgtgccgcgcccagtccccagcctgccggccggtactcaccgctacccggagttcgctcagacggtgagatttggggcgggtccgaggcagcggcgggacgctacctgcgaccgggaccatgaggagctgccagacccgtggggccggtaacgagagcagtcgcggcacctgctgagaggaaagagggagcggtccggcgcggctggggcgcggcagaggcttgcccgatcctcggccatgtcactgctctgcgtgcgcggtgagtgcgcggactgaggcggggaggcggggtgtcggcgtagaggtccccgcacccttccagtggacgtccggtgaccgtctcacccaaactttacatcccgtccg

SEQ ID NO: 10740 - DNA, 728 bp, Homo sapiens
  source 1..728: mol_type = unassigned DNA
ccgggcgtcccacccgccgcccaccgtcccaccccctcaccttttctacccgggttccctaagttcctgacctaggcgtcagacttcctcactatactctcccaccccaggcgacccgccctggccccgggtgtccccagcctgcgcgggccgcttccagtccccggtggatatccgcccccagctcgccgccttctgcccggccctgcgccccctggaactcctgggcttccagctcccgccgctcccagaactgcgcctgcgcaacaatggccacagtggtgagggggtctccccgccgagacttggggatggggcggggcgcagggaagggaaccgtcgcggcagtgcctgcccgggggttgggctggccctaccgggcggggccggctcacttgcctctccctacgcagtgcaactgaccctgcctcctgggctagagatggctctgggtcccgggcgggagtaccgggctctgcagctgcatctgcactggggggctgcaggtcgtccgggctcggagcacactgtggaaggccaccgtttccctgccgaggtgagcgcggagctggccgagaaggggcaaaggagcggggcggagcggggccagagacgtggccctctcctaccctcgtgtccttttcagatccacgtggttcacctcagcaccgcctttgccagagttgacgaggccttggggcgcccgggaggcctggccgtgttggccg

SEQ ID NO: 10741 - DNA, 1431 bp, Homo sapiens
  source 1..1431: mol_type = unassigned DNA
tcggtcggtcctccctcccccaccccctgactccggccgctccacggaccgcagggactgtcctaccgctccccttcacgcaaccatcagagaatcctctcaaaaacacagacccgatgaggagtggcttccccgcctttcccctgtgccgagaagggatcccggtcgccaacaacaaagacgcttcccgctcccctccccccgccggcccgggctcgtccctcccgcgctgcggctcccggcctagcgccccctccccgagccgggctgcggcgtccccaaaccccgaggccgcacgcacctgcacctgagcggcccgggccgaagcgccgggcagaaggggtcgagagagaaccgcagccgacgcgctgtcctccacaaggcgagatccgcgctccgggcgccgtccgactctctccgcctgcagactggcccgacagaggagcggggaccagggctacagcccccggcgccggggcgaagaaggacggcggcgccccaggggccccgctcacgctcccgagtctcgcctcgcgccggccctgctcctccacaagagctcgcgttctgctgactaacggccccggtgcggggcgctggagcggccgccgctgcccgtcggttgctctcgggcctcacgtcccgcgcggccgtggtcgcagccgccgccgccaccgcctccctttctggcactgcagacgccacccagacctagccaggtcttccttctctttaatcctgctttctttgctcctcctcagcctgccaagcgcgaggctcgttccggtagcgggaggaagactggaggggaacggaggggacgagcacaatccccactgagccaggagttggccactgactggaggaaggtgccaaagctgaccccggctccagcctactagcgggcggggggagagacggagcccagccttgcctcacttccaccaatcagaggccgcccggcagggtgggaggcgctctgagctcaaggagaggctgagctcgctcagcaggaggcggggattgcggaaaagaagaaccaataggaacaaaggttccccgcccctttgatttgatggactacacattcgggccaatgggggaattctcatttcgaagaaagtgggacttgttctccgggtttgagaaagaggctgcgcggagccggaggggtcgaggctgcgccgcgtggagtggcttggcttaacagcagggagggcagagcgatgctctttgacctcccagaagagtcacgtgggctgacccagagccggggcggaaaggctgcgtttgtttcttccgggtcattgacagaagcgtcaattcctgggagtagttcgttggttttctttcccctcatccttttgcctgctcccggcgaggggtggctttgatttcggcgatgagctcccagaaaggcaacgtggctcg

SEQ ID NO: 10742 - DNA, 588 bp, Homo sapiens
  source 1..588: mol_type = unassigned DNA
ccgcagaacaggcgcggagtcaggcccctggatttgccctgttggaaggagggccgcggagacgcaggcgctccgggtcgcccgcgctgcccctgtctgccccgtgcgggagccggggtccctggctccctggctccctggctcccgcggcccgggcgaacccagagcgcacccgtacgccggccccggccggtccctagcgcccgggctccacgggccgcgcccccacgcggcgcctcccagagaccctcctccctccgggtgggcggcgcagcggggcctcggcgccgcgaggaccccccgcgccagaacaaaggaatgtggggagggggcagggaggagctcaggccactgagcagccccagtataactgccgttcggaggcgcttctcggtcccgacccgaggtccccgcccgccactaccagacccgcccccagccccggattctcgcagaccccaccggcccgcaggagggagcggcgcactgggggccgcacggactcgccattggagatcgcgatcggaaggtggcgccacgcggcccctacaggcctgggactcccacccgagctcgcaaagtaggtcg

SEQ ID NO: 10743 - DNA, 1203 bp, Homo sapiens
  source 1..1203: mol_type = unassigned DNA
acgcccaaccctcgagtctgcacggtgcagtaccgtctattttgggtccagggtaacctgggtgcaaacgctcctgcgggcggaccgcggggtgggccccgggcacacaggaggatcagcagcagccggtcggtaggcggagcgctgccagaggcttgggcctcacaacaaccctcacaggaccaaaacaaacggcgagacgggctgcgcgcacaatagcatacccgggcggctagccgagtcgggggtctcggctcgcggctgcgccaagtttcagaaccacctagccccgtgcctgccgcccggggcccggcctcgccccggccggcgctcacctggcggtgccgcccccggaagaccacggcgaaggccccgtgtcccacgagatccctcttgctgtactcgaagtcacccaccacctccatggccgcgcccccggggcacacagcggacgggcgggcggcgcagtgcggcgcaggtatcagcaccgcggctccgcgggcccggagcgcgccagcgtgcggcgggtctggggcagccgcagccccgggcccgggcggactctcatgccgagagaccggagcggaaactggggaagctgccgcgcggagccagggtcagcgaggcccggcccggcccctgccgctcatggcccggcctgccgccggccgctggctgtctggcgaagcggcctcggcgctgccgggccaggggtgccgtcaccgtcactgtgcgcgcccagagccgcacacgcgctctgaggcagtgaggggcccggtactctccatccccagctcgtcgggcctcctcggccctccccgctcggggcgctgctgcgacggcgacggccgccgccctagaacccgcaccgccgcggccccgcgcttccccgcctcgcggcggcgcccaacgccctcgcgcgcgctacccgctcccgcgcgactggctgccctccgcgacgtccgcgcgccttgaaggccgcagcgccagccggctccctccgccggggaaaggagtgcggccagggcttggcgcccgcagctgggcagatcctcggccgctcctgaggcggggacgaagggcgcgacccgctgcggccacagcgggttacgggctgcgggctccgttctgggcctggggagcagattcgagccgaccacgccccgggctccaggccgctgggaggcggacttcagagaagcg

SEQ ID NO: 10744 - DNA, 5370 bp, Homo sapiens; identical to SEQ ID NO: 5329
  source 1..5370: mol_type = unassigned DNA

SEQ ID NO: 10745 - DNA, 1691 bp, Homo sapiens
  source 1..1691: mol_type = unassigned DNA
gcgtgggggagcggggcgggcttggtagggacgctggtcccccgaccgtgggacaggggctgggttgggacgcgggtccccactaggagccgcgggggaggggcagggccggagtccctaccctcgtaggggaggggctggttcgggacgcggctcccccggggcgcaggggcggggccgggtggtacgccgggtcccctcccacggccgtgagggaggggccggcggcgggggcggacccctggcggtcctcctggctggggtccgcgcgctcgcggcagctccccgtggaggtcactgtccgtgccagtccctcccgctgtcccgccctctcccgctgccgccgccgccgccgccgcgcccgcctcagcgcccccactccgcgcttgggagcgaggagccgccagcgcccccgccccgccgccgccgcagcgccctcaggccgccattcgccaccgaaactttccagcgcccgcgctctctccgggactcggcggcggcggggcgggggcggcccgggggcggcgcgcggctgctccggggcgccgggccctcttcggccgccgcacggccgggactcggaggctgccggctggagggaggttcggagcgcggccgggcgcgcggcgccgccacaagttgcgctgctcgcgacgaggtgagtgcgcagggctcggcgggccgggcgcggggtccgcaaacttctgcggggaggcgggtcccgcgctgaccctccagggtccggccggcggctcggggcgcccgaacgctccacccgcccctggaactcctgtaggtgcaggtcgccaactgtccccgcggcgctcggactggggtgcggcgcgctcccaggagcctgaacaataccccgaggtggccgctccccgaagtgccggcgcgccttgcggggagagacggaggtcggcggggggctcctttgttttggggagggggaagtggccggtaagtttagggaagcgctcggcttttcctccggtgcccctttgtctgccgattcaggggcttgctgggcaaacctgcgccaccgcgggctccggggaccggggtggagggcggtggcgggatttccccgctgttggggagaagagccccattcatacccgggacgcgggccggccctcccggacccgggtggaagcgcagcctcgcggagtggggcaagcggcgggcgaggtggcgcgggccccgtgtctgctcagtttctgacgcgcagaaactgtcaaggaagtcgggagccccagtcctccgcccatctccccggcctgagcgcacggctgggctgggggcacccttggcccgtcgagggtctgcagagcgccgcccggggagagcgcagacctgttgctgctcctgggctctgacggggcgggtggggtgggtctcgcagatcctgggccccggccttgctatccagggggaccttccctaacgatgggaccggtgctcggagtggagtatggggagtgcgccttcgggagtcggcgctggccggatatgtgacaactgtgggtcgctggaggcccgcctgcgctgggatagggcctggacttcacgtgcgtcgcctgtgttccgtcagaccggggccggggctcgctccctgcaaggcctcgtgttcccccagccagctgcgttggacgttccacaaaggtagggactgacgtttattctcg

SEQ ID NO: 10746 - DNA, 1223 bp, Homo sapiens
  source 1..1223: mol_type = unassigned DNA
gcgctgtcacggagactccggccgccggagaccccgccgcagcgaggccactgggctccccggtcgcggggcgggagcggcgccgacacggggtgccaggaggacccaccgggcggaggagggggcctgtctacccttccgcattttcctgggtctctctcccgggcggtgacgtgacgtgctgacggcgggcccgtgccggggagctgggccgctttttgtcagctccgagctcggcccctcctccctccctccgcccgccccaccagccggagcccggcccagtgctccagagaaaggccggcctgcagcacccgccaccgtcgccggccgcccgcacgtccgtccggtgagtcccgggtgccgccgcggccgcggggcctagtgcgcgcacagcggcctggtctcggcctggtcggcggcccgcaaggcgccctcccgcgctaggccgggcggcgtggcgcgcggcgccgagcaggccccgaggaggccgcagttaggcccggggaggagcccggctgccccgagcggcggcggaggcgcgctccgtaagcgggcgggggttgggggagggtcgcccggttgtgccggaggcggtcgaggggccccgggtcggctccgcggccgacctggggcaccgcgccggggtgaggcctggcgaggaggcgaaggctgcaggcgtgaggtgaaggccgcaggccggccgggccgattttcgctatgtaaatatcggtgagggggggggagggacgggggacaagatggcggcggctcggcgcctgctgcaggggacgatagagggggttgccgggagggggagccgccatcttggaggcggtgtctggagagaaaattccgctacagcccgtgagggggggtgggagagcgggcggcggcggcagcggcgccggtgacgggccccggaggcccggcgcggcggcgtgtgcgcgcggaggggcgtgctcgctccccgtggcggccattgcccttgccgccatgatgagcgctcgggctccaggcgctcggcggcagcgccaccttcctgccttgcctcccgcagccccgtgactggctgcagtttccgctgcgtttcagctgagctgccgcaggcggccaccgccgccgcccggacgccgggaccgtttcaccctcagcgcccctggccctgcgccttcccccgcgcctgtagccacccgagggcagtcggggcaggtggcattccg

SEQ ID NO: 10747 - DNA, 1103 bp, Homo sapiens
  source 1..1103: mol_type = unassigned DNA
acgccacgcgccgctttgccatcggtgctttctgagtgacgttaaaacgctctggatggtggcactgggattatggatggggcttatttagctccctccggcttgctactaaggggaggggtcgtcggtgggcctttcggcgccgctgcaagccaccgggttccgaagtcggaggccgaaacggcgtgggccccgaagcggggccgcttttcagggagtgcgcaggttagcgaggaccccggtgaggcgagacgccaccctcacttggctgtctttgttgctcccacctccccagccccagccgcctgcagtgattcgtgactcccgcaggcctctaaggaccgctgcgcgagggagggggcccgaggcgcccccggcccgccctcctcccggtcttcggatccgagccggtcctcgggaaagagcctgccaccgcgtccccgcagccaccctctccgcgtgcccggccctctccagtggcgggggcacgtgggcgcgcggggtgcgtggcaagccgcccctctccccacgcccgtccggccgtctcccgcgcgcgcgccccgcacacagcctccgtgcagtgggcagagcccggccccgcgcgcgccccgccccgcccctggctagccgcgcccgcccccgcgctcctgcttcctcccctctttccctccccgcctcccaggcgcgcacccctcccctcgcgcccctcccgcgccctacatccaccgcccggcggagggggctcagtccgcagccgccgccgccaccgccgcgcctcggcctcggtgcaggcagcggccgccgccgccgagacagctgcgcgggcgagcatccccacgcagtaagcccgctttctttccgcttgtgcgcgcgtgtgtgcctcccgcccgccggcgtcctgggtcccgggggagcggctgcccttctgccccgccgccgccgccgctcggggctggtccctgcggtcccggctgcctggccttccagggctgggtactgcggcttcggcggcctcgctgaggccgggggccaggggccgtcccgggctgcggggtgcgggacgagggactgcgagtgcgaggtcccccctggtgcgtgcctcg

SEQ ID NO: 10748 - DNA, 616 bp, Homo sapiens
  source 1..616: mol_type = unassigned DNA
acggtagttctcgactgaattaacccgacagcatctgtggaagtcgttggccctgtgccggggccagatcgcgcaactaggagcgggggcccttcacgtggcggaggcttcccggcctgggggccacgggcccggaggaatttgcctggaagttttccatcacggcagagccttctggagctcgccccgtgctcgacaaggggagccccagacttgatttctccagcagccccgcggggcggggccgagaaggggcgggcgggcggaggacgctggcgggagaatgtgcggaatgtgccaggcgcctctacctaccccaggaggggcagaggaaggggccggccgaggggaggggcgaggggcgaggctccgggcggccggagaaaacctgtttgttctcctgcgggcggagcccagtccgcgcctcctcgcctccctgcgcgctccccgctgtgcaccgcgccccgcgccccgcgcctgcctccccggcccggcccggcccggccgggcgccgtccacccgagggagcccgcgccctgcgactgcccgaccctccacccgccccacgagccgggcaccggtgccaggtagggctgtcgagtcgccattggatgcg

SEQ ID NO: 10749 - DNA, 206 bp, Homo sapiens
  source 1..206: mol_type = unassigned DNA
gcggcgggcggctggggaagcagctctgtggtctcccggcgggtgaggccgagacagagaccaacctctaggcggcgccctggcgttgagtccgcgctgaacaagattctctcgcagctctgcgtcccgcgccgggtgaaggggcgtgttcctgcaggcgctcggggctcggcctggagctggcggccggcacgtcgcctttggcg

SEQ ID NO: 10750 - DNA, 1141 bp, Homo sapiens
  source 1..1141: mol_type = unassigned DNA
ccgcagtctgggagcgcgcggccccggggatggggagggggccgggaggaggcgtgcggctctgggggcgcgcactgcgggagcgcgcggtggcgaggatagggcgggccggggttcgcggggcgaaggcgcgcggtgcccgggggagggcgggccggggcgcgcgggccggggcgggggcgcgcgggccggggcgggggcgcgcggggccggtcggcgcgcgggggcggcgggcgcggcgctgccaatcgcagacaaaggccgtcccagtgaatcatgtggtgccgggggaggaagtgcggcttgttttctttcctccagtctcggggctgcaggctgagcgcgatgcgcggagacccccgcgggggcggcggcggccgtgagccccgatgaggcccgagcgtccccggccgcgcggcagcgcccccggcccgatggagaccccgccgtgggacccagcccgcaacgactcgctgccgcccacgctgaccccggccgtgcccccctacgtgaagcttggcctcaccgtcgtctacaccgtgttctacgcgctgctcttcgtgttcatctacgtgcagctctggctggtgctgcgttaccgccacaagcggctcagctaccagagcgtcttcctctttctctgcctcttctgggcctccctgcggaccgtcctcttctccttctacttcaaagacttcgtggcggccaattcgctcagccccttcgtcttctggctgctctactgcttccctgtgtgcctgcagtttttcaccctcacgctgatgaacttgtacttcacgcaggtgagtttcagagaggctcctggaggcgctcacctggcggggtggtccccgcggggcgcccgaggcaggggcgatggcagccgcgggggcgggtccggccctagggctgagagtgtagggagaaggcgccggctctggggtcgtccgaaccctgtcctgtttgcgggcatttgtcataggaaaccccctgccattcccaaaaggggcaaggagaaggcaggggagggctggaggccgccgctcactcgctgcccctggctccgcatcgtgcggtggattcggggcgcttctccgtgcgcagcgcgaagcagcagcgcctgcacacgccagttagtacg

SEQ ID NO: 10751 - DNA, 1819 bp, Homo sapiens
  source 1..1819: mol_type = unassigned DNA
gcgtcgcccgtccctggcttctctgacagccgtgttccatccccgccctgtgccccttctcccggacagtgccttctccagggctcacccaggagggtgcagcggtggcccccggggcggtggtcgtggtgggggtgttagctgcaggggtgccctcggtgggtgggagttggtggcctctcgctggtgccatgggactcgcatgttcgccctgcgcccctcggctcttgagcccacaggccgggatcctgcctgccagccgcgtgcgctgccgtttaacccttgcaggcgcagagcgcgcggcggcggtgacagagaactttgtttggctgcccaaatacagcctcctgcagaaggaccctgcgcccggggaaggggaggaatctcttcccctctgggcgcccgccctcctcgccatggcccggcctccacatccgcccacatctggccgcagcggggcgcccggggggaggggctgaggccgcgtctctcgccgtcccctgggcgcgggccaggcggggaggaggggggcgctccggtcgtgtgcccaggactgtcccccagcggccactcgggccccagccccccaggcctggccttgacaggcgggcggagcagccagtgcgagacagggaggccggtgcgggtgcgggaacctgatccgcccgggaggcgggggcggggcgggggcgcagcgcgcggggaggggccggcgcccgccttcctcccccattcattcagctgagccagggggcctaggggctcctccggcggctagctctgcactgcaggagcgcgggcgcggcgccccagccagcgcgcagggcccgggccccgccgggggcgcttcctcgccgctgccctccgcgcgacccgctgcccaccagccatcatgtcggaccccgcggtcaacgcgcagctggatgggatcatttcggacttcgaaggtgggtgctgggctggctgctgcggccgcggacgtgctggagaggaccctgcgggtgggcctggcgcgggacgggggtgcgctgaggggagacgggagtgcgctgaggggagacgggacccctaatccaggcgccctcccgctgagagcgccgcgcgcccccggccccgtgcccgcgccgcctacgtgggggaccctgttaggggcacccgcgtagaccctgcgcgccctcacaggaccctgtgctcgttctgcgcactgccgcctgggtttccttccttttattgttgtttgtgtttgccaagcgacagcgacctcctcgagggctcgcgaggctgcctcggaactctccaggacgcacagtttcactctgggaaatccatcggtcccctccctttggctctccccggcggctctcgggccccgcttggacccggcaacgggatagggaggtcgttcctcacctccgactgagtggacagccgcgtcctgctcgggtggacagccctcccctcccccacgccagtttcggggccgccaagttgtgcagcccgtgggccgggagcaccgaacggacacagcccaggtcgtggcagggtctagagtgggatgtcccatggcccccatccaggcctggggatatcctcatccgcctcccagaatcgggccgtgggggacagaaggggcctgcgtgcgggcagggagagtattttggctctctcctgtcttcggggtttacaaagtgtgttgggacttgcggggctgctctgtccaagcctgggtctggcgtccgcgtctctgagcctgtgagtgcgtgcgctttcctgcgtcctcttgactgccggtgctggggctctgcgtcctgcgtccgcg

SEQ ID NO: 10752 - DNA, 1813 bp, Homo sapiens
  source 1..1813: mol_type = unassigned DNA
gcgcccagtttcgagagcctatcacagctcacgtctgggcgcgcagtacccccccgacactgctcctgttgtgtcagatagtggcagtgttgagcccaggaatacgcgcggagcccgcggcgatccccgcggccgctcagtcttcgcggcggactccggcgcgcaggagccactgggccgcaagggcgccggggagcgggaggggcgctgggggcggcaaggggtcccagatcccaggccacgaactgttttccttttccccgggcaagagccccgctcccttcaactgacagaaattcactggggcaggggggcgagtggggagagaggtcgctcagggctcgctactggctgcgcctcccccggctctggtctgggaagcggctctgggccctccgggcgagcagcttgggcgccggcgccccctgcgaggaagatcgcggggtgacggtcggtacccgttcggctgggccgcgctgccgctccgatccacctcccttccgcgcccgcgccctcccccttcctttcactaggagtccgggattcggagagggcgcgggaggcaggcacacgggcccgaccccactccagcgctcaccggggacgcgggcgggcggcgacgggacgcggcgggggcgcggggcgggcgcggccatggagcagcagcggcggcggcggcggcggcggcggcaacactagcgaccgcgggcggacgagcgggcgggcagggccgccgggctcagcggaccgaactgcacagctcagcaaaagcgccctcgccctccgcgcgccgcctcctgcgagcccaaacccaccaacattttttaacgctccaacccatcctttgaagaaaagcaaaaaaaaaaaaaaaaaaaaaaaaaaaagcaaaaaaagaaaaagcattgatcggagagacggggatatatatatatatatatatatatatatatatataaaattttttttggctcctgctaaaattagcagggctcgccgcgcgcctgtgtgccagtgtgtgcgagtgtgtgtgcgtgcgggcgtgtgtgtgtgaatgtgattactccaggactcctcgggctccggagacgccattttcccccttgatatctctctccataaatcggtggcgcggcggaggcggcagagtcgggcgggaagcgcggggccggccggggcgcccgccgctcgccgccgcctccgcgcgcccgggggccccggcgccccccgagctagggcggccagctcgcggctcgccgtttgacagatgctcatcgccatggagttgccgcagcagcacctttgggggctcgggcgagcgacgggagccgggatctgagcgagcgccggggccagcggagccggagccgccgggacatgggtgagcacgcgcggcgaccttggcccgggagcccgggcgcccagcctccctccgcgccgcgggcccccgcactcccggaaccgggggcgacgtgtgtgccctgcatgcaaaagttcacgtcgccttgctgggtctttgactttgcacccggcgggaagggggagaccgggccgagggggcgggatgccggtccgggcgaggttgcaggagatgggcgcgattccggcgggccggcgggtgggcggcgatgctggctcaattggagtggctcgttggtggcggcgatggtggaagctttgggctggagggctgggagcttattgagtttcgcctaatctgatctaccccccctccgccccccgccttttgcaccctccctcggtcctgcagccggctggcggggctggcgggtttggcgttggtggagtggactcg

SEQ ID NO: 10753 - DNA, 1872 bp, Homo sapiens
  source 1..1872: mol_type = unassigned DNA
gcgccttgccagtcaagtcgggcagccagggacccacggagcaaagacctaagcgggcatggctccgataaagagtgaggtccgtttcctccctgttgcttcgccagttactaaagatgagtgaggcggaaacacgacggtggggagcgcggggaatggaaaagccagaaggtctcgcaacaacccggtgtcacctgaatgtctgcaaaacgtgccggcaaaggcagccatgcccccaccccgaccctggcccagctgcccgggacacgcgccacgcggcggtcgttaacactcaggggacagacaacagtcacactgcactgacagcacgcagacaacaccggcgaggtgcacacccacacatccaacgacaggctccgccactgcgaggcggctgccaacctggagggaacagggaaagccagccgggtcccagcctccttcctccgaagcacgtttacctaaacgtcgcagtttgcgtccaggctgctcccgctccaccctaaagattatgtcaacgcaggaactgtgggtgcgcgcgggcggcccggcggggagcctccccttctgggtcccgtcggttttatttcgggagcgggagggggaggagggagggctggaggaggggaggggaatcccaaattaaaataaccctcagttatgaggacgttcggtggcatcggatattcacaccagcaacagtcacatcacattcgccttcgccagatggcggcgggttcaacttcccgggatctcgcaaactcaggctgtgcgcccgagcgcgcgccggagtgtgggcacgcgggcgggctggggactgcgggagcggcgcggcgcggcgcgagcccggggcgagaacgggggcgtggggttggggggcgccgggctcaccggttccggacgaggaggtctccgtccccggggagcggcaccgggcagtcccggctcagggtgacggcctcgcggaagttggggctcagccgggtcaccaccagcttctgcatggcttggggaatggcggagccctggaagtccaggaagtggcgggcgtacgacatgtccacgatggcccgggccccggtgggcaccagccgcagcatggcctgcgcctccgcccgctctctgcgccgacgctggccggggtcggcccccgcccgggccgctcggctcggctgtgctctgctcggctagggcgggcgggtccgcccctcctccggccggcgccctccccctggctccccccttccccgcgtcgcccgctcccgctccccccgcctccccggcgccggcgcagcccccgcgaacccgggcgcaccaccccgggtgtcccggcctggggaccgctgccgccccggccgctgctcctttaatctttttgttttggtttgaatctgctcggcgcagactggccaaggatcctctccgccctcccccttcctcctggcgcgggagaggcaccggatatccccaccctccccgagctctaaaagccggatttgactcctctcgggcaagggtggcgggggggacggcgggcaaggggggacgggggactcgcgcgtcccgcggtcgtctgcggccccgagccggcggcagccccgggcgtccccggagctgcgcggcggccggcgcaggcgcctccccttcccgtgcgaagcgttcacttccttgcaaggtggtacgaatcaaccccgagcgcggcccgggcggcggggcacgaccggggaccccgggcagggcggggagcccctgccgccgctgccgcacgcgcacccgtaccgaccgcggggcggggaaatgtccagtgcctcccgctccccaggctggtggcttcctgtccccggaaccccttgcgcgtgctttctgtccacg

SEQ ID NO: 10754 - DNA, 652 bp, Homo sapiens
  source 1..652: mol_type = unassigned DNA
tcgcagaccgtgcactcctgcagggggccccggatgcgatggagctgcgcgagctgacgccctgggctgggcggcccccaggtccgcgccgtcgggcggggccccggcggcggcgcgcgcgtgcgcggttgggggcgcggccttgcgggctgcgcgagctggaggtgcgcgtgagcgagctgggcctgggctacgcgtccgacgagacggtgctgttccgctactgcgcaggcgcctgcgaggctgccgcgcgcgtctacgacctcgggctgcgacgactgcgccagcggcggcgcctgcggcgggagcgggtgcgcgcgcagccctgctgccgcccgacggcctacgaggacgaggtgtccttcctggacgcgcacagccgctaccacacggtgcacgagctgtcggcgcgcgagtgcgcctgcgtgtgaccctacctcactcggccggcgcggcggccactccccccgcctcgacggcaccactggccggccccgcgaaagactgcgcgtgcgtagagcacgccggcgcggccccgggactctcgcgataactgtactgagataaagtgtggcaactcgagctggctggtgattcatcctcggcgaggggctcgcgtgtgggccacgtcgccgtctccaccgggaaagcg

SEQ ID NO: 10755 - DNA, 722 bp, Homo sapiens
  source 1..722: mol_type = unassigned DNA
gcgttcactcacggcgcgtgcagggccccaggcctagggagcgagcggggcgctatgggggccggagtctgggtccaggccgccctcctcctaacctcccttgggtccccccatcccgcggccctcttcggagcgtggctcaccgggcgtgaagagcgcgatggccttgaggcagccatactcggccgagtcgacctgcaggcggcccagcttgtccacctgctcctggaaggcgcgcacctggtccatgaaagccacggcgcgctcggcggccataggcgcggcgtggaggccggcggcggccagtagcggcgccgtgtgcaggggcagcgccgcctgcgccgcgttcagcacgaagagctcgctccagctcaggcgcagcagcgccacctggtcggccaccggcagctcggggaagaagggcgcgtggcgcgcccactccacggtgctgaagagcagccgcgccgccagctcgcacacgttgtcgatgcccagcaccgcgcccgccgcgccgccccctgcgccgaagcgtccggccgccgcagggtagggctcagcgcgcagcagctgcgcgatcagttcggacaccggctgccccgggaagaggtctccgccgctcgccactgccgccagcgccgagcccggggggctgcccgaggaggcggccacggcaccaggcagcgagtgcgggatgcggccgcgctgcaccgctgcgggaggcg

SEQ ID NO: 10756 - DNA, 858 bp, Homo sapiens
  source 1..858: mol_type = unassigned DNA
acgatcacgtcaccgtagaccagggtcacacgatagaccccgcccctactcaccgtcctgagtccgatcaaacagcacccacggcacacactagggtctccgtctctcacacacacacaccacaatgacgtcgtaaacaatagcactaaccaccatcgtccgcagctcccgcgtacagaggcctcaggctcccggctccacgtggaccgacctcgcccggcagcgcggggccacctcaccgcgagctcctcccgcagcccggcccgggtcacctcgactcgccaggcttaactcaataaccacaacaccggaaaaggaagcaaaggtcgaagttcatccgcggccctgaggcctgtgggaaacgtagtccaacaacgaaagagccctgaagctcaagcggagcccgctggccgcaggggccgcaccacgccccagaccctggagtttccgggtgcgcagacccttgccatcagcagaggctgccgctgcgcgtcccctaggcgcggaagaggcggctggtggtccctgacggcaaggtgaagtcgaggcagtaatcgggaacccaggttgggaggacagaatggggaacaggaagctggggcgagggtggtcttgggggaggtggggggccgcggaattctaggtggcccctgcctcacctctggaaagaaccggaagcccgggccggggagggtgaagggagtcgcggacccggctgctcagccgaggaggaaacccggaccccaggctgagggaggccgaagaaggaactggagggccgggctgggaaggcctgaagcgggtacagcctttaggctggggagggtcgaggggagaactcggagcctgagtcgggcg

SEQ ID NO: 10757 - DNA, 598 bp, Homo sapiens
  source 1..598: mol_type = unassigned DNA
ccgaggttccggcgggtccccgcaccggccccagctcctcccccgcacctgcctggccggcgggtcccaccctctctcctgccaggggtagaccctgggaccactcagctcgctctcgcaggccctgagcgtctgacgcctgcgcactgagcgcgggcgggcgggcactcccagaaacctccggggcgctgcaggcgggacaagcaggttccacaggccgagcccacgagcccctcgaggggtgagcggcccgggcctcctggcgttctggccggctagccaagcgctggactacatttcccagaggcacggcgtccggagcgctggactacatttcccagaggcaccgctcccggagcgtagcttcatttccgttagtttgcgagatttggaggcctcgcgtggggagagggccgcgtctgtggaggagcttggctccgcacctgctgggctggcgaacccgaaattgggcttggaacccgggagccagatcttggaccctgaactgcacctctgtcaaggtaggagtgtccgggatgccggagcggacacgcgcggagaaagcgtcgctggggttactcgtgtggccgtgtctccg

SEQ ID NO: 10758 - DNA, 1281 bp, Homo sapiens
  source 1..1281: mol_type = unassigned DNA
tcgaaagcccaaagcctcgggcccaccggccagctccccaccccgctgctgggccggacaggtgtaggggaggcggacccgccccgcagccgactcacccagctccagggcctggtcgcacctgagcagcgcggcctccggctgctgctggcgctgcaggctccgcgcctggcctgccagcctgcgcagccggcactcggccgggaagcacttctccagcaggccgctcagcaccacgttcacgcgccgcacctgcggccgcgcgggccctggctccacgcagcgcttgcagactgtgagcccgcagggcagcgtcaccggcttatgcagcagccgccggcagcgcgggcagccgagcaggtcgcggggcgcgcggggctccggggccggccctccctcgccgggcgcctcgggctcgccgcccgggttctccgcggacagcggccggtcgcgcaggcccacggcgcgcaccaggccgcccgccagctcttccagctcctccggccgcagcgccccgagccgcgcggcgccgcggaacgcgcccagggcttcggggaggcggccggcgcgggccagcgcgtcccccagcctcaggcacaggccgcggtccggctgcgccagcccggctagcatggagcgaaagagctcggctgccatctcgtagtcgcccgcgcggaaggcctcgtcgccctcctctaagcgctgggcgatcggctccgcgcggtcgcagccaggacactggggcggcggcggcggcgggaccggctcggggctcatcaccgcggggctgcgacgacgcgggtccggagcgaaggcgcggagcagggaggatgcgctgctgctgggaactggccggcgggagcgcggtctcagccctcgccagcagccacgcgcgtctgggggcggcgcgctgcgagcggctgagaccgcgggcgggggcgggcgcctggcttgggcagcgtcctcagcgcggtgtgggcggcgagccccgcagggctgcaatcgttccggggtgggggccgggacaggcaccgcgggcgcaatctgagcccctgcccacgcgcagcggcctctcagtcccgccggcttaggtaacccaggtcgctgcggtaacgcagtgaccgcgctccaggtccgcgtctcttgcgatgcttcccccactcgcctgagggctcctgcgcgactgcgcgcgcgtcctctgcctgccgcctccccgcagaggtgccggggccctgggagcaggtggccttggccgcgggctgctggcgcgccggcaccgcg

SEQ ID NO: 10759 - DNA, 1788 bp, Homo sapiens
  source 1..1788: mol_type = unassigned DNA
ccggccaggcccgccggccgctccagcccagcaccagggcgcccgcgcggctgccaaacacccccgggagttttgctcgcaaagggaccacgaggcagctgctggcgcgtcctgcgcgtacccgcccagaggctccccggcttgctcctcgcgggtctgtcccgaaactgacgtgaaaccgatttggtgcaatgcgaatgagctcccgcccgcctccgcctccatcccagccgccgccgccgcccgtcgccataacaaccggcccccaccccccccaccccacgccttgcccctcgggtcccccgggccacaggccacagcgcgggaaggcgccccgccctcggcgccccgcatccggccgccgcgcacccccgcccgcccggcgcttccgagccacgcagaggcgccccctcccgccggagacgggaaagccccggcgcccccagactgggctccgtttccagctcccggaggggctggggctctcccgcgtgcgccccgcacctgccgggggcccgtacccgccctcgccggggctccagggggcacgacggccgtggcccggcgctcttgggaggggagcgggacatccccgaaggcggcgcgctggaggcggggagcggccggggcgcacggagagggcggggagcccgcgggagggggaggagggggaggagggggaggaggcgcgaggtgggggggagcgcggcgggcggcagggagggagcgggagggaggcaagaaagtagcagaaagtgaggctggcaggcggcggcaaaggagccggcgcgcggcggcggcaggaagtctgtgcccgagaacagcagaaataagagccagggagggaccgcggccgcggcggcggcggcgagagcgaaagaggaaactgcagaggaggaagctgcgccgcagcccgagccgcccggcatccccgccgcctctgcgcccgcgccgcgcccccggcgccccctccccagcgcgcccccggccgctcctccgcgccgcgctcgtcggccatggcccgggagaacggcgagagcagctcctcctggaaaaagcaagctgaagacatcaagaagatcttcgagttcaaagagaccctcggaacgtaagtggggaccggggaggcgagggtggaggtggccgcggcaggggctgcacgggcagctccagctgccgccgccgccactaccgcggcagaaacccagcctgtcaccgcgtcctcattgtcccgttctcggcgctgcggagcccccccgagcgcgcccgacgcgtgggcctgcgacccccgggtgggcgccgttcccgggagggggagggggcagcgccgggctgtcagggagcagcccacgcgggcgcgcgacttcccacttctcctgccaccgccgccctctccgctgccttctccccacgcgtgactgtgggctgagcatggtggggatggctgtttaccggctgtgtgcgtttactcgccgtgtgcatgggcgcaccgcgttggcgagacgtggtcacgagaagatcagcctccagtcgttcccatttctgtccttacatcatgtatttctatggaattggcatctgcacgtacgaggtgtaggcaagactttgggtggccacgcgaggatggaagggaagggcttcgcagtgctcagggtcacacgtgggcagagcctcaccggagggtctgtgcatttcacgcgggctcggccgcacgcgccggggagcgcgtctccaagggagggtctgtgcgcgtcgctgcgcgggcggtgctctctccgggctgcatcg

SEQ ID NO: 10760 - DNA, 626 bp, Homo sapiens
  source 1..626: mol_type = unassigned DNA
ccgttcggttctccgcgcagccgtgggatctcgaggagggcgtccattaggccgcgtgtgaccatgtaaggtaaacagggggctcatgaagtcactgaggaccaatggggagcccggagcagagcctggggcggggcttggccctggcggcgggcgcggattggcacgctgcggatctccctgctgccttacaaggcggtgcgaggcgagctatttttagagggctatataagggggctgaggcggccgcccggcggccgggcagcgcgagcgcaagggacagggagggtcgtggcgacactcgcgccagctcccgggacggctgggctcgggctggtcgccgacctccgaccctccactagatgcctggcagagcccggcgcgtccggagcccgcgcccctcagagggaaggggtcgcgcgtcgccgcggcggccctgaggctgacggtcgggaggtgaaaggccggagtgcggggtcaggacgcctcctggagggggcgcggcgcagggggccgcggggaagccgccgagggcgcggagcgggaaggaaggacagtggccaccccgcctccgcctgggcacggggcagggacccgcgcgaggcggtgccggggaggtcctcacg

SEQ ID NO: 10761 - DNA, 1037 bp, Homo sapiens
  source 1..1037: mol_type = unassigned DNA
acgaagtcctcgcgaactgaactgagagcagacaaaagcacgcgctcttctccaccgccacgccggtcctacccaaacccgcgagttatccgtattctccttcaggagtcatagtcaggccagaagagtgcggagggacggggcccgggaagagcagggaacccccagagcccgcagccaacgcggaggtgggcgagcgggcgtgcgcgcactcacttgccggcgcgagggagtgtcgggggggaagggagtggtctccaaaagggggaggggagaaggcagggggcggggagaagccggccctttaggacccggctgcggcggcgagggaggaggaagaagcggaggaggcggctcccgcgctcgcagggccgtgccacctgcccgcccgcccgctcgctcgctcgcccgccgcgccgcgctgccgaccgccagcatgctgccgagagtgggctgccccgcgctgccgctgccgccgccgccgctgctgccgctgctgctgctgctactgggcgcgagtggcggcggcggcggggcgcgcgcggaggtgctgttccgctgcccgccctgcacacccgagcgcctggccgcctgcgggcccccgccggttgcgccgcccgccgcggtggccgcagtggccggaggcgcccgcatgccatgcgcggagctcgtccgggagccgggctgcggctgctgctcggtgtgcgcccggctggagggcgaggcgtgcggcgtctacaccccgcgctgcggccaggggctgcgctgctatccccacccgggctccgagctgcccctgcaggcgctggtcatgggcgagggcacttgtgagaagcgccgggacgccgagtatggcgccagcccggagcaggttgcaggtaacgcggtctggaacaagtagttgggagaaacttggagggcagcggagaagcccgacgggcggctggaccttacggacggttttaggggcggcagagccgagaccttggaccaaatcaagggggactgttgctagcgggacgcggaagtcaggcccg

SEQ ID NO: 10762 - DNA, 977 bp, Homo sapiens
  source 1..977: mol_type = unassigned DNA
ccggacttgacggagcaatgcacgtgggcctttgactcgtaatacacccagtcaaagccggcctccactgccaagcgcgccagcagtccatacttattgcggtcgcggtctgatgtggtgatgtccaccgcgcggccctcataatgcagggactcctctgagtggtggccgtcctcgtcccagccctcggtcacccgcagcttcacaccgggccactggttcatcaccgagatagccagcgagttcaggcggtccttgcagcgctgggagaggaatgtgcgcgaaatcaaccagagcgaaatcagccggaggagccggccgaggtgcaggtgtaggcgcagcctcgcccagaactctcccgccacacccaagggagctggaagcccgggagggtgctgtccctctcccttaggaacagagggccctgaagtgctccctccctagcatacagccgcccccggggatctggaccgcacggcggtatcacaaatctggaggaggcatggaggcaagcgccctggcggcgccttcactggtaggtggaggtcccctctctcctgtgctgtcttcagctccgggtatccatccctccacagacaggactacacctttcagcgcccggtccctctgtgcctccaaggcaggagggccagccagcggccgggagggaggagtggcagcagagccgactgcctgcggccggcctgcgaggcgtgcaaggcccgaggtgcccagtaggtgtcaccgcagcctcagggctgaggcctggggacgacaggctctggaggcgcggcaggtgcagagcgtctcggtagcttcagggggtgtgttggaggggaatcgccggcctgcctggatccctcgagcaccaccgaggattcccgccgggaccctcttataatcttaaaccggcccacaaccccgccagagatgacagggccagggaaccagaaaccggcggattagcgccagggccg

SEQ ID NO: 10763 - DNA, 6206 bp, Homo sapiens
  source 1..6206: mol_type = unassigned DNA
tcgtcctcctgcggcaggcgaggcggggtgcaggtgtgagtggggtgggaggaaggggaaaggatcggggtcgccgcagcctttctggtcagtttcgctgggttttgtcagttccgtttgagaccgaggcgcacggactagcggccgccagcacctcacaggtggaggacacctcttgcgccccaaggtcaatgtcatcccgatgggtcccgtgccgtcctgactctccctgacctaattctttggttatgactttctcaccttctgggcttcgcctctgccagctttcgccgacgtcgcccttcccgccgcccgcccgggccttcctacccgctctcctccctccctggcccgacggtcccactgaggcaaaaacaaacagccctgagggcacttcaaggagcgtgcagtggccccgacggtactctcggggggataaaagaggtggccagccacgccgtcggcccccggccgaataatgggcgcgcagcagattgccagggggcacttgaaactcgaggggagggaaatacttgagcgcggtccctccccgcgaggacgcacgacgcagcctcgcggatcgtcccttgttcgctctctttcatgcactctccttttgtgtggaattatctaaacgggagatccctggcagctttatgctaatgcgccgaacaaaggcaacggcccgcgggcgggaggcccggaaggtgcctggggccgggccgggcggggtggcggccaggcgggctgcgcgtgtctctcgcgtgcccctgggactgacacaacaacccctcattcctgcaaatacaaagcctctcaccggctcgggtcgggcgcacccggcgcagggaggcgctggtccctccgggcggcgggcactgcagcggtaacgcacggttcctgccggttgtggctcgggggactgagggccgggagtgggggcttctgtgaagccagaagagaagtctgcagcagagtggtgatgaggggcgctgacacctcacccccaacgccgacgtctccaaacgcgataccctctgcggggtgagaatgcgggcccgcccggctcctcccgtgaggccagggcctcctgttctcctagacaccccaaggagccaactcctccgcagaagttccccgcttctgctcttatttccaagcttcgcgctttctacaaactccctgttgccttgactttgatttccagccgtggtgagggtcagagtgaaccccggcgcgctccccgacggcatccccgcacaccaggataggagaaattggagggcctggggcctcgggctccgcagtcgtcggaggaagaacccaccgcggggtccgcaagggaaagtgaagaggcccgggatttttccaaagcgctggccaggaccccgaaggaaggggaggagtcacctgaagccggggaaggccccttgggtgctctgccttggatccttatgttcactgactttcgcgaagcccccctggaggggggcaaatccgcgctgtttcccccaacttaacttcacgcggcccattctccgaatcgcgtgcgccaaggccggcgtcgggggcgcactgtgatggcgctttgctcttcccaggcgaagacaaatatctcgacccgatgtccccatgcatgcgggtgcacaggttctgagaaaatcacgcagaaggcggctgcgatccacggcccgggctgggctacacctgcttggaggtcgctggtgtgtgcgtgcgcgcgtgcgcagcctaactccttccagccccgggtggtgaaattagtttccaatactagtacctttcaagtttccatttattttgactgtacccgtctgaaagcagatttcatttacgctagcaagactggaagccacaaataaagaaaaagaaacggattcattgaatctcagtatctcagtagcgtttaatagattcccttggctaaattcagagccctgtttgaattcactcacgcaggagttgttttgttttttttgttggtagaggtgccggtttcccatccccacggcttatttacaattatgggtgttgttatttttaaaggattcacaaggtgactaactctctgttatctgttgaatggaaggagtgttacatatgcaagaccgaatggggcaggccgagcccccgccctatgctattctacaatccagatgggattcgtgattagaaaataaaattggccaaagctgtctcggaatccttttcccacttctaatttcatcagcactattaatcagagctcaaaagagcaaggaaataacatcagttacttttagatagaaatatgtttataaattttagataaactcattttaagatttctaacttttggggagactagcactcaccacagcatttttaaaactagggtgagacttttcaaaatatatttcactatatgcattcttcccttttcagtgtgtgagttaaaatattacaaacataaaattatcaaatatctttcccttgattaaccaacctgattaaccccttaattaattaagcctaacaactgtccccatcacaacttatgactcatgtggactctatttttacatgtttaatttctacgccagggtattttcagagggaaaatccaaaacaattaaataccttcagtggaattaagcgtaagtaaaactcagcaaaatctgtctggtatacaaagctttgcagaaaaatgtttccttctctttcaataaagtgacattttcctcacagcatatgacattttatgtggcttggctatttgttccccagtgttggacgatcagggccactacgcactcgtggggttctctgccctgtcccccgaagattctgccttttgtgtttcctcggggctgggctggacagaggatggaggcaggcggcccagtctgggtccaaacggaacggcagcggaggtgggggtgggggtgggggcggggggaatcttcgctgttgtctcttcctggtggcacaggggaggcggcttgtcctctcggaggcctcagcctgcctcagagtacagattgccccccctccccccgtccagcacgcgtctcttttgcgtccagattggccgcgaccggagctcaatagcaggaggttaatttccttcacaaaggtgaagggggcacggctccgtgggggctgcgcccagacaggcagcccctttatttcgcagcgccttgattggagcccttgatttagcatctgatgtcaaccggcaaacaaaatgcccgctcggaatgaaaatgcatgaggccgcgcggggaggagaaagccaacttcactggggcgcacgaggccgaccgcgcgtttcgggcttcggccaactcgacccggattaaccgagccttggaccacgcggaagctccgggcggcctgggtcgggccccgccaaagatgccattcccaagcctccaagaacccaaaagttcagaaattcacgttcctctgggaacccagcccagcccgcccgcgctccaatcccgcgctttcgggagactgagaaggccgtgccaattccttctcaaactcgaaagaaaccttctctagccccgtgggcgcgcggaggctgcgagcacaaacatcgccctcggccactgccagaaggccgggccccctgtccacacttggaaccccggggaacccttttgcttggcctcttgggtccagcggcccatccgtccaaggtccgggcggaggccgtccggaccctgctgctctctcggattcttgtttatttcccaaacaccacgcggagccactgcgcctccgcaacgatctcccccgcaccgccccggcgcgcccccgcccccacccaatcagcgcgcacaacttccccctcggctccggctcgcggattgaaccctcctgacatatttggggccattcttctcctttgttgctattttgctagcgacccgcgggtaatccccgcgcgggaggggggcgtgcattgtcgcgctgatggacgggcccatttggcggctccgcgccccccggaggagagacacaaagcccaggcacgtgcgcctccccatagagaagcagcagaccgtgaagggaggcggggccgggcgtgtgcctggaccgggcggggcggcggcgccgggcggggcgaccaggggcgcgcgcgggggccccgcgccctcaggtacatctgccgcacctaccgggcgacccccgagtcccggcccccttttggccgccccatcgccctcccaccctgccaggctgaggagctgcggacgcgctgattggctccaggggaagcgggaggcgagaacaatggccccctccccccgttaaaagggagcggctgccgggcccggggacagggacgcgcgtgcagggcgcagagctgggccgagccgtcgccggcgccacgcgagtcccgcagccgccgcgcccgggcaatgggccgggggcactgagggccgccggggccgagcgcggaggggggaccgagccagtgccgtgccctcgggccgcgccaacatgccccgcggcttcctggtgaagcgcagcaagaagtccacgcccgtttcctaccgggtccgcggcggcgaggacggcgaccgcgcactgctgctctcgcccagctgcgggggcgcccgcgccgagcccccggcgccgagcccggtccccgggccgctgccgccgccgccgcccgcggagcgcgcccatgcagcgctcgccgccgcgcttgcctgcgcgcctgggccgcagccacccccgcagggcccgcgggccgcgcacttcggcaaccccgaggctgcgcaccccgcgccgctctacagtcccacgcggcccgtgagccgcgagcacgagaagcacaagtacttcgaacgcagcttcaacctgggctcgccggtctcggccgagtccttccccacgcccgccgcgctgctcggagggggcggcggcggcggcgcgagcggagctggcggaggcggcacctgcggcggcgacccgctgctcttcgcgcccgccgagctcaagatgggcacggcgttctcggctggcgccgaggcggcccgcggcccgggccccggccccccactgccccctgccgccgccctgcggcccccgggaaagcggcccccgccccctaccgccgcggagccgcccgccaaggcagtcaaggccccgggcgccaagaagcccaaggccatccgcaagctgcacttcgaggacgaggtgaccacgtcgcccgtgctggggctcaagatcaaggagggcccggtggaggcgccgcggggccgcgcggggggcgcggcgcggccgctgggcgagttcatctgccagctgtgcaaggaggagtacgccgacccgttcgcgctggcgcagcacaaatgctcgcgcatcgtgcgtgtggagtaccgctgtcccgagtgcgccaaggtcttcagctgcccggccaacctggcctcgcaccgccgctggcacaaaccgcggcccgcgcccgccgccgcccgcgcgccggagccagaagcagcagccagggctgaggcgcgggaggcacccggcggcggcagcgaccgggacacgccgagccccggcggcgtgtccgagtcgggctccgaggacgggctctacgagtgccatcactgcgccaagaagttccgccgccaggcctacctacgcaagcacctgctggcgcaccaccaggcgctgcaggccaagggcgcgccgctagcgcccccggccgaggacctactggccttgtaccccgggcccgacgagaaggcgccccaggaggcggccggcgacggcgagggggccggcgtgctgggcctgagtgcgtccgccgagtgccacctgtgcccagtgtgcggagagtcgttcgccagcaagggcgctcaggagcgccacctgcgcctgctgcacgccgcccaggtgttcccctgcaagtactgcccggccaccttctacagctcgcccggccttacgcggcacatcaacaagtgccacccatccgaaaacagacaggtgatcctcctgcaggtgcccgtgcgcccggcctgctagagcgcgccctccaccccggcccccgaactgtgccttcgcttggagacccacaaagagagtgcgccctgcactccccgaacccgagtccgcgctgggggagcctcgcccccgcccccaccgggtgaaagtgtcgtctccgcttctctcggtgtggcgtgacg

SEQ ID NO: 10764 - DNA, 574 bp, Homo sapiens
  source 1..574: mol_type = unassigned DNA
gcgccctcctccttgttcgcgtcctcggccttctcgctggctcctgcccgagtccctagcccctctgcaccacaggtttctggggcttcgtcccggacccggccattttccaggctcggagtagtcgccgtggaggccgcttccccgcgcccaggggaagggaaggcggtcccggggcccgctgcggggtggagggacccgcgccccccagcttctcgggcccgggccgcggggaccgtgcgcgcgtccccctcccgggcaaggccgggcggcgggcgcgccgcggcttctggggtccccgccctcttgtccgccatcgcctgcgggagcctctggcctggaggggctcggggcgcgctggcgactgcgggctcggcgacaggggcggctggtggcgggaggacagtgggaggaaggctccgccccacgcgcccccctctcggatgtgattcgccggggtctcccgcagccggggcgagcggcttggaagcccggaggaggggtacggaactgcccgatggggatgcgaccgcgggcgccagacgaactgtccccacattcgttggcgctggcg

SEQ ID NO: 10765 - DNA, 3438 bp, Homo sapiens
  source 1..3438: mol_type = unassigned DNA
tcgctggtggagcccgcctccctgaagccggagttggcgagtttctcgcacttgaccttgtaggcgtctctctcgcgggccagccgggacacctcctgcttaagctgctccacctgctgaatgagctgcgtcttctcattctccaggtggtgcttctgctggacgcgtttatacctgcaagactgggcgtagccccggttcttcagggtccgccgcttctgcttcaggcggatcacctcgtccttggtgaagccccgcaggtggcggttcagctcgcgcacggacatggacacgagctggtcgtcggagaagcggtcctccacgctgccgttgccgcccgccgccgtcgccgaggccgtcgcgtgcggcccgggcccggggtggctagtgggcagctgttgcgccgggctagcggcgctggacggcggcggcgacgcttggtgatgatggtgatggtgcgggtgagcgtgcgggcccagctcgtcgtgggccacgccggcgcccgggtacgcgtggtgcgggtgagggtggtggtgatggtggtggtggtgagcgccgcgaaagctgtcgaagctttgcagcggctgtggcactgggtgcgagccgatgagcgcttccaccgcgtcctcgggcgtcaggttgagcgcctcggggttcatctgctggtagttgctcgccatccagtacagatcctcgaggtgtgtcttctgttcggtcgggctgaagctgggcgacgagggcacggagctacacggagtgctgagcggtgtggaggacaccgagccggctggctgcaggcgtgtgcagggcctgcccggacgctccgcgcgccccagtggctccttcttcacgtcgaacttgagcaggtcgaagtcgttgacatactccatggccagcgggctggtgggcagctctggccccatgctcagctccgcggccatcgctgaagcgaggcgcagccgccgctgccgcccgggaaactttgcggccggccggagcgcgccgagccaagcgcgggggggaagagcggagaagagctggggaggcggggagcgagggcgcagcgggccggggccgccggccaagcctttgtctggggacgcggcggcgcgccggagagtcccgaggctgcctgcaccgccccagagctctgggctgtgcccgcgcagggaccgggccgggtagagtcgggcggggtggagaggcaagcggagcgcgcggtggggctgaggggaggcgtggggcgagtgcccgttgctcgctctctagctctcttgctcttacgctctctcgctcgcagccgctcgcagctcggcggtgcagctgtgctggatccggcggcgccgcagccttttatcgcctcctgatgtcactggggtgcgggggcccgggcggcccggtgcgcgggccaatagctgcacggcctccgcggcccagcggcgcagggcggggcgcgcctgacagctcccccgccccccgcgtcagctgactggcggcccgagcggccccggagcggcggaggcctggcggagcgctggagcggagtgggacggccagcctgggcccacccccgtaccctgcaggtcccggcccacgcacgctcgcctggagtgcgcgccccacctctaggccaaatcaccgctttcccctcctcgcgcactctcctccctcagttccctttgcaccccacccccatcccgtgtcacccccaaggaggctcagaatgagcgccgggacaacgcctcctgggccctttgttcccaagcggcccccgcccagtgggcgacgctctgtgtgtcctcgcggcttctggccgtgtgtgtcgtgcgttcctgtttctggagatctgcgcgtatttgtatgttggggagggcgggctcgaggctccgagagttgtgttcagacccaactcttaacctcaggggacctttctcaggccaagcgagggcccctcctggcgggtgcagtcgcagagccctgaggttcgactccactggccccgccgctccccgcgttcaccccaccgcacaatgttcacagtgaaggcgacgggaaaagcagcagcccaaaggctctgaattcctcttccccgccacacgcacggaatcctgagcccccggagcctcggggccgaggccggcccgggacggtgctccgagtagctctccactgctggggagccggccctgtttttgtttgaacgttttgtaacgattaagcagatcccggcgtcagcccgccgcggagaggctcaaacaggcataaagtgcgaccccaagtggccactgtgcgcaaaggcgccgcgaccgcccggcccacggccggaaggcttggacggcgcctcgtacccagccaggtctcccctacctggcccaacccaagccagcccagaacgcatactatgtgtgcaccagagcccaggacaggttcccctcgagcgatgtacaggtcctcgggtcccgtcttcgtactcagccgcgagcctcgagccgcgagctccgctctggtcgccccgttgaaattccgtgccccagcgttcgggggtgcccgtcggctgctccctgggccggaaggtcctgggcggaggaaggccggtagccaaaagtggaagcgccacagtgaagcggcccagggccaccgggtgagaaacctccccggagggcagacggggagaccgaagcacaccgcactaggcatccagactgggcttgggagccgcgcaccctccctacccagatccaggatggctagaattaacgggttctttctgagacctcggctcaggcgccgaaaccggatagatcgcgaattcgctggacccggagacccgacccgcctcccgcgtcaccttcttctttctagctttgggcgcgcgcagcgaaaggcaggagaggcgcgcactgggtgagtgagtcccggccgctgtctgcgctggaccagcccgactgacctcgcgcgtaggggtcgcgtgagccacaccggtgcagacgcgcctagattatttttaaatgttagaaggtaaaatatttgcctccaattaatctgaaaactctctattctcttgcgccctcggagaggctggggtacggcgtggtattgggccgcctatttttaataaaatgagtgtattttaactaaaacttaactcaatcttgtggggtggcaaattaaatgctggaagagcgcgtctacaaccctcttcgagaagcgtgctctccgcagaaatgagtcggccgcctggagagagagcctgggcggtgccgctgcgcagcccctgccagtagctgggggttggggactcgcaccttgtaaatgtcctcgtcttgtttgaacgcagtgagagcacactcgtttccagatcactcgggaccgggtgtctcggatctgtgcagactatgtatggctccggcctcaggcggccagggcgggacaagcacg

SEQ ID NO: 10766 - DNA, 4088 bp, Homo sapiens
  source 1..4088: mol_type = unassigned DNA
acgcctcgagcaccgactccacagccacggccaccgctcctcggctcccgtgacaccggcgcgcctgctgcttcgagcaggggaggctttgcactcccatcgcacttttctcgtccgaagatacgaaactccgtccgggcgtcgcaaataattcgaattcggctctctgacacctacctcggcgggcgcgcgccgctgggagggcggggtgggtggctggaggtaaggaggcgcacagcaggggtaagcgccgccgtcgcacactttgcacgccgcccagggctacaccactcaccgaaaattgggaggcaggtctgggaggcggggttgagcgcccaccgccttgggcgcgcccgcgccccccgccatcgcggcccccgcgcccccggcccacgcccgcgcggtcccggcaccggcctgcacccccagggtgcgcggcggcccatttgggtgcgtccccggtgggccgatttttcgcgcttccccttcggtttataggggccgctgctatgggtcggtcctctgaagaggctggggcgtcatcggggccggttagaagctctgctccccggcggggacactcagtcgcgtcggcaccgcggagcgggctgcgtcaggtggctggccggcgcggcgctcccctgctctctggctccgggctgcggcgcggcggctggagcgagcccctgtcccggcgcggggcggcggcgggcggccggcaggcgctgccttgcgtgtgagtgcacctcactcacatgtaagtcggggagcgccggggcctcccgcggaagtgcgagtcgcccggcgcaggcaagagccgccgggtccgggacaaggcaggggcgcccgggcgccgctgccttgccccggggcgcctccgggcaccccccaattctctctcttttctcttctccattggcgtgcccaagagccaaaccaaggagcgcctgagggtaaacagactcctgccatccgcgcctttgcacttttctttttgagttgacatttcttggtgctttttggtttctcgctgttgttgggtgctttttggtttgttcttgtccctttttcgtttgctcatcctttttggcgctaactcttaggcagccagcccagcagcccgaagcccgggcagccgcgctccgcggccccggggcagcgcggcgggaaccgcagccaagccccccgacacggggcgcacgggggccgggcagcccgaggccgggggcaagcagggagcccgggccaggcgcgagccgagctccccgaggtggccgggccaccatgctgaagatggccatgaagctcaaagcccgggcggcggagagcgagaagaagacggccgcggcggctgccgaggtggctgccgaagctgcggcggcggctgcggcgttggccgagccgagagagccgctcgcgccgcggaagagcggggaccccgagaagctcgcgaagaaccccaagaacccggcgcgggaggcgctccccgaaaagttcctaacagacaaggagcgcaagaagctcgagaagaagctgctggagcagaggcgaaaggaggagaagaagaaggagaaggagaggaagaagatggagaagatgctgaagaagaagaagaagaaggtgccagaagcccaggaggaggcccgatgccccgaggccgccgccgccgcggccgccgccgacgacgacgagggcgccgaggagggcgccgtcgggggcgccgaggagggcgccgccgccgggggcacgagtagggcctgggctgactgggacacggactcgagcgacgaggacgacgcctactacgcggcgccgcgcgttgggggcatcgtgtggcggcccgggccgctcaaggctggcgcgctgagcgcccacctgcccctcgtggtgttcctggtcttctcggtgcgcagcccctcgtgggtgctcaacttcctgctgcagaagcgcacggagcagggccgcggctgcggcttcgtgttcggggcgacctgctgcttccgagtgttcctgggctgcgccttcttctcctacttgggcggccgcgccaagcgcagaggccgcgggcgctccggggccagaggcgccttcggctcgggccatggcgcccggcgccgggggcgcgaggagcggctcatctagtcagaccccccaccccgccaccgccaccagacaccaccatcgctgtgtagtgtgggtttttattcgtgttcgtgtgtgtgtgtggacacattttccttttcggttgctctgtcctttggttcgtgctcgcctcgctttttccacactcctgctctctggctctctgtgtctctcgctctttcgaaaattttcctaagtccgggcgcgcgctccctccccttccgcccaccccagcccctcggcggcgcccgcgggagggggaggaggcctcgggggcgccgggcgacgcggtccggggggtggagcgttggcgtcgtgcgaggggtcgtcactggcgcggagacgccccctctcccccctcggctcagccgggctgctgcccgagcccggggggtggggggcgtctccccggcccgtcccgtccccggccgggcgcgggcggagggaccccctccccgggctcccggggggccgcctccctccgccggctcccgccctcccagccgccgccgccgccgcggccgctcctcggccctcctcctcctcctcctccttccacccccctcgccgccgccgcctcctcctccccccgcctccccccgcccgccgcggcgcttttggctcggggcggcggcgggggcccggccgaggcaataagagcggcggcggcggcagcggcggcagcagctcccgcagctcctgctctggtccgcctcggcccggcggcggccatcagccccctcggcctcggctcgaggggcggggagctgcgcgcgcccctcggtccgaccgacaccctccccttcccgcccgtccgcgcgccccgcggcccgcggcccgcagtccgccccgcgcgctccttgccgaggagccgagcccgcgcccggcccgcccgcccggcgctgccccggccctcccggcccgcgtgaggccgcccgcgcccgccgccgccgcagcccggccgcgccccgccgccgccgccgccgccatgggctgcctcgggaacagtaagaccgaggaccagcgcaacgaggagaaggcgcagcgtgaggccaacaaaaagatcgagaagcagctgcagaaggacaagcaggtctaccgggccacgcaccgcctgctgctgctgggtaagggcgggcggggggcgccggccccggcccgggggccctcgaagggcgccccgcaggccgcgcgcgccgagcccgccccccgccccgggcgcgcgctcccgagccccccgcccgttcgcgggctctgtctgtggggggcgaggccggaagggggacccaggggcgcggattcggccgggcgggggctcaaaaacggggcggggggccgtggcgacgcgggcgcgggtccccctcccccggcctgcccgctcagtgtctctctcttgctctcgctctcgctctccccctctttctctctttctctctttttccgcgaggcctacacgacgccaggggtttgggtgcgtgttggggagggggagggggagcccatggggctccggagactgcgacaaaaagagggtttcggggacaggaaaccgggtggcgggtagagggagggggacccgcctccgtggggtgtgagatttgttgggagagggaaagaggggaagaaaggggcgaggagaggagggggtgacgctggggggcgccgtggtggcggagggggcctcgccaaagggaggctttggcggggagaagtggccgaggagagtgggggggctggtgacatcagcccctcggaaaggatcggagcggtaaaggtggtgcagtgggggggagggggcgcaagggagtcgtggcgccggagtcgggaggggggcggcgaggggaggagggagggcggttgccgctgggcgcgacttggtgcgtttcgggcaggaccgactgactgtgtgtgcgcggagcagacgtgtcccgggccaggccgggccg

SEQ ID NO: 10767 - DNA, 522 bp, Homo sapiens
  source 1..522: mol_type = unassigned DNA
ccggctttacttcgtttaaagccggatttcgcttagtcccgtgaaagcgaaggagcaccagcgcttcctgattccgcacagttctctcggcagagacggcccgtcctctccaagaaccggaagccggacagcgtcaggacgttttattcttctcacctgggattcagagaggcagcggccaaggacagggcccccgccgaggccaccgggcagcgtccaggtctcggcctttgggaggggagcagcgggggaggggcacggggaggggcgagggcggggcgcgcctgggcctcggcgctgggctcctcctctgcccgctccgggggacacccacaggattcttgcagacctctgccgaggcaggatggaggcctgcagggatgcaccgcgggcccgcgacccgggcggccggaacatagttctttctggccggagatcggcccggtcgtgagtcgtgtctgtgccaggccccccacgctgtgctccagggcctcagtgcccggcgcgccgggggctgtatcg

SEQ ID NO: 10768 - DNA, 2260 bp, Homo sapiens
  source 1..2260: mol_type = unassigned DNA
acgttttcggaaagcctcctccaatgggaagcgacttcgccgctgagttaagcgtccgaatcctccttcccgcggcagggacaccggcccgggccaggtctgcggaggacgcccccgggcgcgcacacacagcccgaggacgcgccctgtattttaagacgcagggtcggatttcaccccgaaacttggctcccacagccccaggccgaactgtgtctggttctcagcccccgagcccgagttctacgccgcaaagagatggggccccattgtgcctagctggcctcctagcacggacgtgtattttcttttggtctgtcttttgctaaaaaccggcagtgcgcttcgcctccctgcccagccgcagcctgccgtcccctagacaaaaagcggcgaccgcggcccggccacccgagccccgccgcgctgcgcctttgttgggcggtccacagatggtgcccagcacggggccgcgccgagggcgggggcgggaggccgcgaagagggtcgggcgggaggggaggagacggcggagcagccaatccgcgcgcggcccatcagctgaccgcctttgcttacaccaggtgcacgccggctgcggggagcacaaagcggggcgcaccgcgggcgccggcaacgagccggtgaacgaggcgaggcccgtgcgcccgcggctgcaagcgcccgcctggcggggagaggggccgacggcgtcagcccgggcggcggcatccctaggcgcctggggcgccttcctccggacctggccgctcgctgccccgccctctgcaccccacttctccgaccctccttcccagtcctgcctccccctgccctggcctctgagagccgactgagcccagccccgtgcagcagcggttgcctgtgtcgccgcctagtctccggtcttggtgctctcccgggggtgccccaaggagccagtgcgcgctgcgggctgggaaggaggcgccgctcagctagtcctcctcctcctcctcgtctttctcctcctcctgctgctgctgccgccgccgccgccgtgggtgccgggtccgcgcgcaccccaacacccccaccagctgggcctcggggtaagtccctggccggccgcgccgcggcaggaggtgtgggaggcagcgaggggaagtcgaggcaaacttggtggcgtgggagaccctacggggtctggggaacctcagggtaagatcgcgggcctgagggggacgagggggcgcggctcacggagctggggaaaatgacgaagtcgggaaacgagaatatagtgccccgtttccccccgtcccccttgccaaaaaaaaaaaaaaaaaggtgtgggagagcgatagttgggaaggcaggccagatagaaacaggcaaaaaaaggcagtgaccggagccgagcctgctggatttcaggggccgaccaggggagggaggtgcccggggacggggagggaggagggctgccgggatgtgaaccggggaaggcagctggggctggagagcagcgcggaaagggggcccagggagctggaaagagggccaagaggagggcaaggaaggtggcgggcgacggggagaggaaagaaaaagggtgtcttggcggtggccttggtaagagaaaggggcaaggggtataattgacaaggcactgaaagtattgaagtcagagccttgggaaggatctaccgaactctcggcggtccacgcggggacagacctcagcccgtgagccttgagctccacgcggggacagacctcagcccgtgagccttgagctccacgcggggacagacctcagcccgtgagccttgagctccacgcggggacagacctcagcccgtgagccttgagctccacgcggggacagacctcagcccgtgagccttgagctccacgcggggacagacctcagcccgtgagccttgagcccagaaggagtggcagcctcaggacgtttgccaggtggcctggaatgtgagggaagcctcagccccgccaggaacagagctggcgctgagttcccggctcggcccgggtcagaagcgaggaaagtttgccggcgagtgtcctttgtgctgcgtggagaggggtgtgggcggccgccgactcggcgcttccccgccgcccgcccagggagtccctgcctggcaagctggggctcggggaaaagtccagcagcgagagggccgcgtgtcccgggacggttccaggggagcccgcgcggaaacgcggaccaggcgcttcggcccggatgccg

SEQ ID NO: 10769 - DNA, 1502 bp, Homo sapiens
  source 1..1502: mol_type = unassigned DNA
ccgcgggacggagacagggagttgggaggaaacgcaacgcgcctcccaggcaacagactccgagctccggttcggaaacgctccgaggcagaagcaagggcttctaagggctccgcttcccagccttgggtccctactactaccttccccctagactcggtgagcccaggctgatggaccgtgcagtccagtttgagccagcccagcagccctcaatcgggcgggcagggaagaaggcctcctactgccgggaagaggccagcgcgctccaagttccccgcaaattccgcccttcccgcctggcacggttcccttgcaccgctgtgctccgctcccaggtttctgcccgccaagaatgcttgccccgggggcgcgctcgctggtcaggaacctgtcggcagcccccgggaacccctgaggatgcggaggtgggcccgagagctgcggcttcgatgccggggtgggagctaggcaggccgcgcgccgccgcagtcctgtcgcagcgcgtgccctggtccctccggaccgaaaaggccgaagccgtcccccgcgaccgaccccgcgcaactggctcgggtctgcacctagatggctgtgggccccacagggatggccgggcgggcccgttcggccgctacctcagggtcgccagtccccgcgcgcggccgcctcccgccaggaagggtggcgggcccggaaggccagagatgccccagtgcttcccgcgccgctacgcacctagctgcccgcgggtcccacatggctgcggccggagggtccgcaccaggaccgccgccgcctggggaagcgcttccctgtgggcagggcgcggcgggcagtgcggaagcccgaaagctaccggagcccggggcaggggcggcgcgatgcagaggcggcgttcgggggcccccagctgcctgcggctcggctacccagccgcgatcagagggggcgggggacgcaggaaccccggcgtccgggcggtgtgcagccgcagacctattccaagtttccacgtagttgcgagagcccaaaaactgtcacgtgcacgtcgctgctgagtgggaggaggtgtttgtcatcgcgttcaaaaggggcgtttcggtgtctcccgtcatgcaagcaaatggtatggctctcggccgcctttgaataaacgagtgcttcgaaccctttaccaggagggactaggcgcacaaccacctccgacactcctcgggcatgcgagaattcggctttccttagtggggcccatcaatgttgtccgggaggtaaagaaagtgatcggccaacggcctcagcgtgggttttctccttccctcgttcctccctccaacaaaggacgtacggagaacaagccccctagctcctacagatgaggagctcaggagtcgggcgaatatcaagtacttactgtgtgcttgcccctccactctggggaggctgggggtccgggagtgaagggggcagcgagaccgcgggctgctccacgctcaccgtcg

SEQ ID NO: 10770 - DNA, 510 bp, Homo sapiens
  source 1..510: mol_type = unassigned DNA
gcggccggtcctggaagaggtgggggcgaggggtcgggggctcacacgccctgcgatttcctcccatgagaatgggcgggggcagctccgggaagggtggcggatggagccgccctctccccaggaccacaggggcgctttccagtgaaggcgccgtaggaaacgccagtctgtgccgcagtgtacgtagaggcgctatgagcccgagtttcccacgtccagggacaaactgggagccgtgactgtcaggccgcgcggaggctgccctggccgcctttgcggtcaggtgaaggcgcagaggcagggaggccgggcgagcgcaggcgggcggagagcagaccacgcggaagaggccgagagagaaagcggggcacccggccgggggggtcatttacaagggacgctgggcacgaaggaggctggggcgaagatgagtccaggggttgggttgagagcgctgcgcagccgggctgagaagagaagctgacgagtgactcccgacaagggacg

SEQ ID NO: 10771 - DNA, 940 bp, Homo sapiens
  source 1..940: mol_type = unassigned DNA
tcggggcgcaggcaggaggcactggaagcggaagcgagtggggagtccgggtagagggagtcgcccacctgaccggcttcgccccctccggggtttgctgcagctgagggccccggaccagcgattctagaagccggtccggggccgggcagtccaatagcttctcgcggatttccctccgctggcgcgcagcagcggcgcgtggattcgcgcgcgggctcgggacggcgcgagcccgggcagcgcgagcccctgcgcggcagggagtggcgcatgcgcgggcgtcctgcgagcccgctggggcgagccgagccgcggcggcgccgggagccgggcggcggagctgtgaagaagcaagcggcggcacgggagcagcggcgacggacaggtggcgagccttcgcccgcgccgccaggggctgctgggccacccgcggagcctcgcggtccagacgtggcgggggtggcggcggcatcccggacggcctgtgagggatgcgccgcccactgccccgcgccgcctgaccgtccccgcctcgactcgcggtgcgccacagccgggcccgcggccgtccccgccgcgttgtcgcccggtcgccgcgcccgcggggccgcgcccggcacggccatgtggacccccacggaggaggagaaatacggcgtaggtaggtgaggctcaggcctggccgtggcgggggttctgggggacgcgcccagctcccggccccgcctggattcgcatcctcgtgcccccgccactgcccgcaggctgcgcggcctcggcgcggggcgagcgcggggtgggggcaggtgcgggtgcgggtgcgggtgcgggggtgggcgcgggtctctgtgcagagagggcggcagggggcgctggcggtgcggccttggcaggtgcggcccgcgggaggggtgggcaaggcccgggcagttgcccg

SEQ ID NO: 10772 - DNA, 2718 bp, Homo sapiens
  source 1..2718: mol_type = unassigned DNA
ccgccgttagttatgattcatgctccagcagcgctgggaagtgggccgagggaactgaggccggggtgggtgcggaggtggctctgacggggagcgccgatccaggatctggtccggaccctgagctcggcaggacctgtgcgcacgcaggtagcgtcgcgtcctcccccaggctgcgagaggttgctctgccatcaggccatggaccccgagccgcccgtgctgcgcgcgcgcgtgtgcgcgcccccgcctgcgcccatgcctgcgccgggggaggcgaaggaggctccagtcttagaaagagcagcttctggaactcaccacccaggccggccgccgctcggccccgtcccgcaggctgcaggcggccctggagggggcgccctcgccgagcgcgcgccccgcgccgccgccccggactcctccccggcgccgcgcgggcaggttcgaccaggcggccgcgggctccggttcccggccagctccccagggcccgcggcccgccccgccccgcgcgcccgccccgctgcgcaactcgacccaagttggaagccgatcgcaggcggccgcactcgcgcccagcgcagggcggcggcggcggcggcggcgcagctccggcgagcgaggcggcggccgcacggccaagcgtggaccgcggggggcgcccgcgcccgggagcagccggaggactcgcggcggcgccggcgccccgcccgggaaagtaaagttggagacggagggagcgcgcgggcgcgggggcccggaggagcggcggccggcgccccggcgcgccgagccctagccggccggatgggaggcggagcgcccgggccgccgccgcctgtcgcctgcgccccggctgggctccgggaccgcggggccgctcaggcacgcccgctcgggcgccgcgtcgccgtgggctcgacgccggggcgctccccgtgagccgggccgagggcggggccgcgcgaggaccccgggacctgcccccctccccccgcagccgcgtcgccgctcgctccgggcgcctcctgctctgcacttacacgctcggcagctgcggggagcccggcagccacgctctccggcgcgccgcccgcggagccaccacggccgagggccggctgctgggcgccgcggtccccggcgggcgcgcccgagcagcaggcggcgatgcgggcgccgaccccggctggggggcgcccgagctgccgcggctgcgccccggctccaggagggacggcgtagctcgcgggaggaccatggcgtccccggcgctggcggcggcgctggcggtggcggcagcggcgggccccaatgcgagcggcgcgggcgagaggggcagcggcggggttgccaatgcctcgggggcttcctgggggccgccgcgcggccagtactcggcgggcgcggtggcagggctggctgccgtggtgggcttcctcatcgtcttcaccgtggtgggcaacgtgctggtggtgatcgccgtgctgaccagccgggcgctgcgcgcgccacagaacctcttcctggtgtcgctggcctcggccgacatcctggtggccacgctggtcatgcccttctcgttggccaacgagctcatggcctactggtacttcgggcaggtgtggtgcggcgtgtacctggcgctcgatgtgctgttttgcacctcgtcgatcgtgcatctgtgtgccatcagcctggaccgctactggtcggtgacgcaggccgtcgagtacaacctgaagcgcacaccacgccgcgtcaaggccaccatcgtggccgtgtggctcatctcggccgtcatctccttcccgccgctggtctcgctctaccgccagcccgacggcgccgcctacccgcagtgcggcctcaacgacgagacctggtacatcctgtcctcctgcatcggctccttcttcgcgccctgcctcatcatgggcctggtctacgcgcgcatctaccgagtggccaagctgcgcacgcgcacgctcagcgagaagcgcgcccccgtgggccccgacggtgcgtccccgactaccgaaaacgggctgggcgcggcggcaggcgcaggcgagaacgggcactgcgcgcccccgcccgccgacgtggagccggacgagagcagcgcagcggccgagaggcggcggcgccggggcgcgttgcggcggggcgggcggcggcgagcgggcgcggaggggggcgcgggcggtgcggacgggcagggggcggggccgggggcggctgagtcgggggcgctgaccgcctccaggtccccggggcccggtggccgcctgtcgcgcgccagctcgcgctccgtcgagttcttcctgtcgcgccggcgccgggcgcgcagcagcgtgtgccgccgcaaggtggcccaggcgcgcgagaagcgcttcacctttgtgctggctgtggtcatgggcgtgttcgtgctctgctggttccccttcttcttcagctacagcctgtacggcatctgccgcgaggcctgccaggtgcccggcccgctcttcaagttcttcttctggatcggctactgcaacagctcgctcaacccggtcatctacacggtcttcaaccaggatttccggcgatcctttaagcacatcctcttccgacggaggagaaggggcttcaggcagtgactcgcacccgtctgggaatcctggacagctccgcgctcggggctgggcagaaggggcggcccggacg

SEQ ID NO: 10773 - DNA, 2661 bp, Homo sapiens
  source 1..2661: mol_type = unassigned DNA
gcgcggccctgctccgcgctttctctagccagcacccacgtgtctctatttactctactcaggttaccagctctatcgcccgcagcgggccagaagacccgataaagcgccttccaccctgcaggactagtgcccggcttccgctgcttctccgcctttcttctgcgtagatttaaggcctgatccggtcccaaaccccaaataaaagttgtgggtttgtttccaagtgatggcggttggagaaaactagagttgggggcggtacagccagggtgtacccttgcggtgggtcggctcggcgcacccacagctcccagctgctagcccaggcgctggggccgcagggactgaaccccgcaccgcccccgcagcccgggtgcgcgccccatcggccggcctgctccccgcggcccggctcaccggtggtagggacggccccgcctgccccagcccacgcccgcctccccttcctcccgcctgtggctctgctcgtctccacctaagcctttggtggtttaacgcacttttgcagagacatctaccaagagatagcgtgtgcactttgttttccgtcccacggaagaatttatcagtagcgttattcagccctactcgctttaaagcacggcacccctcagcccaacaaaaagaccgaaggcgaaacattgtgggttcctgcccgcgaaccaaccgttcagccaccgaaccccctaaactgatccatttggaataagttaccctgcccctctacctcccatcctacacacacacacacacacacacacacacacacacacacacacactgcggaccgggggcccagctacgcacacaccccaaaacaaacgagggatctactcgggaccctcagccgggcggccgggcgccttcgttcccttcctccctctctgagtttcccagggacccgccacgcctctcggaactggggcagcggcccgctcacctcgtgtccgttgctggccgggatgatttcagactcgttcaccaaggaagacttgatgtcagctaaatcgccttcctcttcgggatgactgatctcggcgaagatcttttccttctgaggatcgccctcgtccttgaaggggatcatctcgtccgtggcgcagagttccgggtcccccccgccgccgccacctcctccggagagttggggcatcccggcggctctgtaatctccgctccgctgtgggagcacccgcgcaacagcaggaaagacagaggggtaactcaagggtgggggaggaaaggagagttggaagggttcgtgcagcaggacagcgggcggaagcggggcgggcgagcgcggggccgccggccggcagccggagcagctgccgcggcgcccgaatcccggcggccgccgcgctttcccgcttcgcggagaccgacgcaggcgcccgcccccgaggccgaagggcactgggcggcgagggctgcggtagctggcgactccgggggcgtctgcgcggcgcgcgctagacgaggctgccccggcggccaccccgcgaccccgcgtcgccgggatttgcgcgcggagaacgccggttctggagggagcacgcctccccaaagtgcagaggagggtccggcggcgcgtctccgcggaaaccctctccactgtagttaccccggatgccgacttagtagtttgttttccgagaaaagagaggggatctgggcagaagggccccgtttgccccaaaagaaggtgcaaggatcagaagataacgaaacgtccacttcctgaagggtgggaaaaaaagaaaaagaaaaaggagccacccacgctggagatgtccgttttagatcttcttattttcttccctttcgcttcggtttttcttctcgaggctcatttaatctgctagagaaggaggaggagcagaagatgggggccgaggaggaggggaagagaaagagaagtttgccaagaataaagtttttgccggcaagcgcggggactccgcagtggagggcactgcggagtctcggggagtcacagcgggggcctcgggcccaaatgcctctgcccggagctcgagccgacacacacactcagtccgacccctctttgttcccggctcgagtttctcagcctggctcgccggctcgccgctctgcacgcctccgccggccagctctgtcaaagcaaagagctgcgccccttgagttcgcccggccgaggggaggggacgccccgagcttggccgcgtgcgaggctccgggcgcgtcctggttcctcggcccgagagcgcgcagcccgggtccctcctccgcgccctgccccgcaggtgagcggctgcgcctccccactgcttctcctcctcccgcgcctcgccggcgctgaaaagctacccacttgcgtcgcttctcctccctctcccctcccccgcctctagctctccttggctgcccgctggaggggaggcggggggtgagggggagtcggcgagaaggaggtggtgattgagggcttttttttctttttcttttcccagatcctgtaggacgagtcttggttttggggtgtgtgagtgtggtgtgtgcgcgcgcgcctggagggaaggatcaggcaacttggcgagagaaggaaggaccgggcgctgcttataacccaccgaaaggcacgctttgcccgcg

SEQ ID NO: 10774 - DNA, 801 bp, Homo sapiens
  source 1..801: mol_type = unassigned DNA
gcgaggaaaattgacgttctattcctccggatcctgctcgagaagctgggggactcgggtccggtgccgaggtgtggcccgagcctggcaccacccacgccggccgggtgaccccggccccttggggctcccgcgctccgtcagcaggcgacgctgggaggctggggtaggcccagagcgaggacgggcccggactgggtagtggggatgtaccagggccgggtgcggcgggagacggcccgggaggcggaaggtcgcggacctgcccgacagaagagtagatgaggggagaccgaggacgcccgggtccggggagcttacgaggaggccaggatcgcggggtaaggaatccgcgggcagttacctccgccaggggcagggtccggccagtcaggcgcgagaaggctaggcgaggccgactgcgcggggtgaagacgccaggccgacagctgcgggccctaccgccagccctgacgcgagcctgcgtcctggcgacggcggagggcgggcagggggcgcgggcgctgccacggcgcctgctcagaaccggccgggaacgccgcgggcgggtctccccggtcctccgcccctccagccctgctctcaggcctccgcccgggccctctaagctgccagccgcgcccgcctccgggctcctcgcccctcctcccgcgcgctcccctcctcagcggccgccggaccccctcagttcacttctcccagttaacgcgttcctcggacgctgctagtttgagcgcacaggcattgggcggggctcacgggggagccgcttaataaccg

SEQ ID NO: 10775 - DNA, 311 bp, Homo sapiens
  source 1..311: mol_type = unassigned DNA
tcggtctccgcttcggtggtttcaggtcccgggttctgtctggcggctctgcttctaatgcggagctggcggttttgcagcaacgcttttgccagtagcgcccactgagcggtttttcagttgctgcaccgttcttagcgcccaacggaacgtttcccgtacgcggagtccataagttgtctgtgtcgtcactttctcggttctggcaccgctagtatctcctaggaacttcctaaacccgttttacggtgcagaacggtaattgcaccgagcctctgtgccaactagtacttccgtaataccgttagccg

SEQ ID NO: 10776 - DNA, 1048 bp, Homo sapiens
  source 1..1048: mol_type = unassigned DNA
acgggagcaggccgggctgtccacgacggaagcctcgaccctggctggggctgtcggccgggcagcgcgggagagccagggccagagccggggccgggaaccctagtcccgccgcctacgcgggatgcagcgaccaccgcccgccgcccccgggccggcactcacctccgtggaggggcagcggcgccagcacctggccgcggacctcggccttgggggagtcaagcccgtagcgcccgcggtcgatgcgaaacgtgagcggggcgccgcggccgggctcctgcaccgtcacgttgatgagcgccgtgtagtactcctggctcgcgttgtctgcccgtgccggccacaggctgcaggtcagcagggcgagcgcggcgagccgggcagggcccgcccgccccgcgcagctcatcgtccctccggcagccgccgctgctcgcggaccgggctccggggccggcgcctagaggcggggcgggcgcggcccgggcggcggcgggagcgcgcgcgcgcggcctgcgcggggccgagcccgagcgcggccctcctggacgccgcggccccgccgctcgccgccctcacgtccactgcccgcctgtggggacgcgcccatgggccctcggcgagggcggcgtctcaggtcgcacgcgggcgtctcttcggggtcccaggagggttgtagaagcgtgccccctccatccccccgggtcggtcccaccgaatgggaggcgcctcgcaaggacgcggcgggggaggggaagggcggcacgggaggaagcgccccgaggagggtcagcggaacacaaagtccctctcgcgcggctgccgcctgaggcgcgtgtccgccgccgccccgcccccccgctggtctagcggcaacgcgcaggcctaaggcgcagtcccgccccgagcgcatgcgtgccagggcctgtccgctcccgcccgcctgcacgagggcccgggcagccgggtcagccgctggtgctggttgtttctctgtcaggcgtgatagccgcagggcgtggagcccgggagatttgcgaggacg

SEQ ID NO: 10777 - DNA, 301 bp, Homo sapiens
  source 1..301: mol_type = unassigned DNA
gcgaaatccgctcccgccccgaagaagggctccaagaaggccgtgaccaaggcgcagaagaaggacggcaagaagcgcaagcgcagccgcaaggagagctactccgtatacgtgtacaaggtgctgaaacaggtccaccccgacaccggcatctcctctaaagccatggggatcatgaattcctttgtcaacgacatcttcgagcgcatcgccggcgaggcttcccgcctggcgcattacaacaagcgctcgaccatcacctccagggagatccagacggccgtgcgcctgctgcttcccg

SEQ ID NO: 10778 - DNA, 1395 bp, Homo sapiens
  source 1..1395: mol_type = unassigned DNA
gcgaaccgatctgcacccccctgcccactaggaagcggtcgtcgccgccgcaactgttggcgctgaccgcgcacgactggaaagttgtaatcctatggtccgaggggtaggctcgggctgagcaggtccccgagtcgccactgctaagtatggggtattccaggaaggagttcattcttgcattgtccatctgtcactgagtgacctggtcctgcgaagcccggcgtgactgtgccaactttctcacttcctccatggggccggagaagaaaaatgatatgaatgtacagtgcgcaagagggggggcgggagggcggaggacgctggaggaggggcacgtgacggtgtcagccaatggctgagcctcctgcaaaagtttgccggcttccgcagtgatggatcaccgttttagtggcatttaaatccccggcgctccgccgtctaggtgacgcgcagtcgcccccccaggcagcctaggcggcggcagctgctgcggcgactgcaaaggccgatttggagtgctggagcgaagaagagcaaaagctgcgttctgcgcgcgcccgactccgctgcccgccccgccaggcctccgggaggtgggggctgggaggcgtcccccgctcccgccccctccccaccgttcaatgaaagatgaactggcgagaggtgagaagggaagagggctcccggctctctcggggcgggaatcagtgggccagagctcgccgggtggccgcaagtacgccggcccagcccgcagcgcgcccagccggaaggcggggaatccggctgacaccgcgccccgggttcccaggccacctcctctgttctgaggctgggctgggagaccgtggggctgtgaggagcgcatagaaccgtggtggagggcgaggctgggccaccggctcttcaagctcggaatggagggggaagagcgcagagggctggctgggaggaactcgggtgggcgtgaaggagacgagggcaagaaaagaaacttcccttcttccaggagggtcttcgaaaccctctccccacagcccctctcgtcattagcatggcaatgaggagtttctgtaattcgacttggaggggcggatgagccctggaaactcagagctcgccggaaaaggccgggggcggccgggctcttcttccccaccttccctctctcgtcgctctccgcccctttctctttcccactcagttttgcaccgggagccctccgggatgcggagctactcgaccgccggatttttaggggtaggaggcgggggagagagatgacgctggcggacgtggccagcgcgggggccgggcggtgcgctgcaggccatctgccggcgccctgagacccaggagcctccgcgctcccgcgtgggcctcacagggccg

SEQ ID NO: 10779 - DNA, 766 bp, Homo sapiens
  source 1..766: mol_type = unassigned DNA
tcgggcctccctcgctgtggcccgtctgtatccttgagctggcatctgcctcccgggcggccagacgcccgcctggccttccctccggcctcggtttcccctccgcggcgctccaatggcccccgccctccgcgcagggccacgactgcttcccggtgctgttcacctatgacgccgccgcggggatgctgagcttcggcgggcggctggacgttcctaagcagagctcgcagcgtggcttgacggcccgcgagcgcttccagaacctggacaagaaggcgagctccgagggtggcacggctgcgggcgcgggcctagactcgctgcacaagaacagcgtcaggtgagagcgggagccgggccggcgggtgggcggggcctcggctcgcccagaaacagcgtcgggtgaggaaggggcctggagtcttcctcctggggcattgtgctgggaccttgaggactggggacccggagggagggtaggcgtgccctcaactcgctgcgccggaacggcgtctgatgagcggcgggcccggacacgaggggacggggccgatttgtgggcggggccttggcgccgtactaaaaccgcgtggggcggaggccggcagaggtcgcgtagcgggcccagggtagggagtggctttgactcgctgcggaataacatcgttagttgtgggcggggcccatcttgatctcaccatagcagcccaggtgctagtggagcctgggagggacacggtgcgaccgacataagacggggtcg

SEQ ID NO: 10780 - DNA, 691 bp, Homo sapiens
  source 1..691: mol_type = unassigned DNA
gcggtaaagaggccggacacggaaccgctcgtccggtgaccgaagagacggcgaggaggagcccgcgaacccgcctctgttcaggccccgcccactcgacgtaatttgcccgcccctctccaccctccgaagggtggagcctgaggccccgcctccaagcggcctctccccggagtgcctggcggccagcagggcggggcaggaggctgggagagggacgggtgcgggggtgggggagaggaagggagcggtcacgtgtgaggggcggcccgaggtcacgtgacggagcgccggagcggagggagccggggctgggagttctcctgagggaagaggagtggagtaggggggacgcggcggcggcgttgacaatggtgagtgcgcggcggccagcgcgctcgcctcccgccctcgtcccggagcgcgcggcgggccggccaaccgcgggccgggcgtcgccggaggaggggacgggggagcagggcggggagcggggttaggcctgtcgggccacccctgggtctgggaaaagctggcggcgccacctcttcccggtctcggcgaggcccgagcacctacgggcggcggcgtgctctcctggccatgtcggagcctctgcccgcgttcttcgactgcttgttggggctctggctggggactcggaccccgcctctgcgggggctggtcgccg

SEQ ID NO: 10781 - DNA, 1024 bp, Homo sapiens
  source 1..1024: mol_type = unassigned DNA
ccgggagggcgcagcgcccgggtggggagcccgagccagcccaggccggctctggcctcctgacccagacagcgcagggcgcgagggatcgcgcggccgagcccgggtcgcgccgctcccagcatcggggccgctagccaagagttcgaggccttcccgatccggatgtgatgaaaaagagcaacagagggagaagtgtttcaggattgtaggagtggaagaggggaaagagaggcagagagggggaaggccccctcgcaggggagccggctggagtgagctggctggaaagagggggcggagtgcgcggagtcagagccgccaccgctgccgcagttgccgccactgcggcgtctgggctgagccggagggaggcgggaggacgcgcaggggcggccgccgccgtcgtcaggccaccggggcgaaaatgcggccgctgccggaggctcgctaactttccggggcggaagaggaggaggaggaggaggaaggggcttggagcgactacggggggatgcggaggtaggtagtggtctccgggcggggaagaggaggggtttgatccccatccccggggttctcccaaacccgatctctctttccagcccctccccgctgggtccacctcggacccctgggaccccgccgctgtcaacttgcgctgtaacagttttcttcgcaagtttcaaatcaaaacttccccggggtggagtttgagggagggaagtggagggggagggaacgtcccgcaggggtggtgtgctcttctctaaaaacatttttttttttaattttgtatatttttccgccagaagcagtcagttccctgcacccagcacctcacagcccttcctccgtgcgccctgccgggcggcgagctaggcggcagcggcgcggcgcgggctcggcggagcggcccatgtccggcgcgggcgaagccctcgctcccgggcccgtggggccgcagcgcgtggccgaggcgggcggcggccagctgggctccacagcccagggtgagtgcgcg

SEQ ID NO: 10782 - DNA, 1339 bp, Homo sapiens
  source 1..1339: mol_type = unassigned DNA
ccgcctccagcgcccccaggcccatttcccgcagaccctccccgggccgccctcccctgccctactctaggcgctccctctccctcgcagccacaccgtggctgcactcgccgtcctctcttccggccgctaccaccccggccccctagaaccccagcctcccgcgcccgcagccgcgttcctgtctccccgacctccgcacccccacttggcccggcctcctcgccttcctcccggctcctcccctcaggacacctgtgtcgtcccaccccctccaccacacacgcaccccccaccccaattccttcgcctccctgtcctccctcccccgccggtctcccctccccgctgctgccccgagagcccgatgtgggagggaaggcgcgggggaggggaggccgcgaagggggctgcttttctccgggttccccgtgctgcggaactgcagggctccccagcgccctctgccttcttcgccggcggcgcggaagtcggggtctcccggacgcccccgatgagggtatttaccttcttgccggggacactttgcagacggctccaacattggcaaacactacagagaactgaccccgctcggccgccgccggcttccacccctcgggctccccgccccccgcctccgcccgcctccgcccgcctccccggcgctcccgccgcgccctcccgcgctcgcgccgcgcgcccccgcctgcgcagccgctcccgcgccccagcacgcccggccggcgcgcgcgcccggcaccggctctacctccactccgcctcccgccggcccgcgaccaagcgcggccattgttcgcgacgcagctcccgccccctggcggctgccgggccccagcagctgcaggctctgcggggctagcggcggcgagctgggcccctgggcgagggccattcccggggggcttgggcacgcgggcgagcgactgcgcaaggagcgcgcccggtccgcagtctcctcgtccccggcgcgactccccgccccctcgtctgccaagggtgggcctggggcagccccttccacacctgcaactcggcaacttccttccccgcccgactgaccgtctgctctttctggtccgcaccctgtgctctgattccccgctcgtacctttcccaggctctccggctgcccctctgtgctgtgcaggggacgcgcgaccatcccgcgtctgctccggccgccgctgtgcaacgcacggtttagcggatcttgcacctttctagacgggggagggggcggggaggaggttgcttcaccgtctcgcccagcaaacaccagggatccgtgatcacctgctcgccaagacccgcggcg

SEQ ID NO: 10783 - DNA, 2273 bp, Homo sapiens
  source 1..2273: mol_type = unassigned DNA
acgcggtggcactggtggctgccggcagctgtcgtctgcagagtgggtgagaccgagtgtggcagatggcttggtccgcggtgctggaggggactggcggagcagaagcgccctggcgccgggtccttgctttcctggagctggggcttggggaatggggtcggtcattgcagggacagaggagagggcagggtaatgggtgcgcaggggtcccttccaaaggctgcgggtggccaggggtgtgcgggggcgctgaggtgcggtcgccgagagattctggcctccagggtggtcgggcctggcatggactctaggggatggtgcacacaccggaccggacgggcccctcccttacccccggatcccccggctgggcagcggccagggagaggggcgacctacgggggcgggtgtggggacgccggactacgcgtcaggagtcccagatgggcccagacccccattccccgccccgggccgcagtgacgtcagggcccggacgttcccggaacggcctcttgggggcgttccagccccacggacccgcagggagtccccgccgcaatttgcatggggctcatttgcatgaccccgccccgcgcgggagtcgggggcgccggcgactggaggagccactgtcaatccccaggggaaagtgggcgaggcgatttctgggccgctcacctcactccaccctccagctcgcgccgcacctggggccctcccccacctacgccccgccagggcggggccgcgggcgcagacactcgcgggcacacgcacgacgacgcgcacacgcggtcgcacgcggccccccgagccccctgcggcgactccgattcacccccgcgggtgcggggcgcggacccgcccggcccagctcctgctccccaggcgcttcctcctcccgcgacctgccccggccgcacccgcctccgctccagcacgcgacgctgcccggcgcgacccctgctcccccggcccagccccaccgctgccctcgactcaatcccagttgaacgcccgcagcctcagtcccacccccggcccagccccagcgcccccagtcccacccccggccccagcttcagcctcagcgcccccaggcccagccccagtcccacccccagtcccaacaccttcaggcccaccctcggccccagcctcagccaccccagccccagtcccggcccagccccagccccagcgctcccggccccgggcccagccccagccccagccccagccgagcacccccggccccgcctgcccggcgttcccttttgtgcggcgctctcccgtccgcatccgcccgatcctctggaactccccgcggacgccggggtccctggaggcggcttcctttgtctctgctcccgccctccctccgcggcgtcttcgcccctcactcacctccccagccccgcggggacgaggggagctggagggagcccgggacccggcgcggcctccgcaggcggcgctttcttctcgctcccgacgcggccgcccctcctgcctgcccgctcctatcgccgcttccgcctctgccggggacggggacagcagaccctcggcgcccggcccccgcgcacctgccgcgcgcaccgcctctccggcctgcgcggctccgggggctccgggaagaccgagcgctggcggccagcccggggaggctgtgggcagcaggggtggctgcgggctcccagtccctcctccgcctacctcggagcccacatttgggatttctactccgggagaattctgccctcctcccacgatgagcctggaggactggagccgggacctggcacccccagggctgtgactgggtgaactctgagggcacagctgctgtccgccgccccaggggtcccaggatggggcgagcagccctgaagaggcccaagggcaccccgtgaggagcccccacgctctgagagtggggcgcagagccggagccccgggccatgcctccgctgccgctggcgcgggacacccggcagccgcctggcgcctccctgctggtgcgaggcttcatggtgccctgcaacgcctgcctgatcctgctggccaccgccacgctcggcttcgcggtgctgctgttcctcaacaactgtaggtggccgcgggcggggcgtcgcactggccaagccccaaccccgaggcccctgcacatagaggctggaggccgcggcgggtccgcggggctcccggcagcttcccggggatgggatgggtcactctgcggacccctcggtccctggaggccg

SEQ ID NO: 10784 - DNA, 5586 bp, Homo sapiens
  source 1..5586: mol_type = unassigned DNA
gcgccggctgctggggctgccaggtgccaggagacgcctccctcgggcctgccccggcgcccgccctcaccggcgtctgtcctgccgcccagctacaggcctcgggcctccccggcagcgcggagctgacggtgggcgcggcggtcgcctgcttcctggcgctggagggcgccgacgtgagctacaccaaccaccgcggtcggagcccgctggacctggccgccgagggtcgcgtgctcaaggcccttcagggctgcgcccagcgcttccggtgagtccgtggacggcggggatggggtccggcggcctccgggcccctctcaagccgcctcctccccctgcagggagcggcaggcgggcgggggcgcggccccgggccccaggcaaacgctcgggacccccaacaccgtgacgaacctgcacgtgggcgccgcgccggggcccgaggccgctgagtgcctggtgtgctccgagctggcgctgctggtgctgttctcgccgtgccagcaccgcaccgtgtgtgagggtgagtggggggccccggggtggggaggcccggctagtagggccgcagccaaccgcgctctcctcttcgcagagtgcgcgcgcaggatgaagaagtgcatcaggtgccaggtggtcgtcagcaagaaactgcgcccaggtgggtgaggctctgcgcccccaacacgcctcctgctcagctggtggcccgcgggtccccgtcccccaccccttccctcccacacttccgcccatggcccttccccaggttacaccccgccctcccaaggctcacacccggccccccagcccccagcccccagccccgcctgctccagatcacacccggcccacagccccgcctcaaggtaacaccctcctcccccatcacaccccagccccgctggatttcacggcccctcccagatcacactccctccatagccccaccccagatcacagcccacccagagcaccgcccccccatcacaccccggcccagctcacagcccacctgcagccctgactccagcccgcacaccaccttatgcctgatttccacggctcacctcctgcccgcacccgggccccacctctgcctccaaatcacccaccccgccagccccccttgcaggtcacaacccgtcccaggtgacaccccgcccccagcctcgcccccccgcagctccctgctccccgcattcccccacccggcctcccagctcacacccgtcccccaccccgcagacggctctgaggtggcgagcgccgcccccgcccccggcccgccgcgccagctggtggaggagctgcagagccgctaccggcagatggaggaacgcatcacctgccccatctgcatcgacagccacatccgcctcgtgttccagtgcggccacggcgcatgcgccccctgcggctccgcgctcagcgcctgccccatctgccgccagcccatccgcgaccgcatccagatcttcgtgtgagccgcgccgtccgccgcgcccgagctgccttcgcgtgcccccgccctgtgttttataaaaagaaagattctcggacgttgcctctgctgtctgcctgggggaccgggcgcctctggggtcctcccctcgggacacgcgggcgagcctgggggcgaggagggggggcccttccctgggtccgccccgcccgccccaggctctcgggtccagactcccgcccggactgcggccttcgggccaggacacccttcaggcgcgggcacggccgcctcccgccccccaggcccgggtccgacggggcggggactcctgtgtctgcccccgggcccccctcgctcttccgtcctgggggcggccgcggggactcgcgctctgatccaaggggcccgacactccccagggctgtggggtcccgtcccagcagggagttagttggggggcgtcccaggcagggtctgggggccgggcgcacgcaggcggggtgacgagctgggggggcggggggcggtgtcggagcaaatacggcggccaggcccagcctctcgcgctttccaagaaccgcccgcggccgccgccagctgcttggcgctgaccccgttggccgggctgccgtcaccctgggcccgacgccggcgcggaaaacggggagggacgagacagacacaggccggtctggctcggaatctcctgctcctctgcccaatcccccacccccgccccgcgggacgccggtgcccggtctcggtcccagcccagagccgctcgcgcctggacgccggccgccccgtcgaacctttgggtctccgagctccccgcccccgcccccaatcaggaccggtccagacctccaggcccggcgcttagctccgtttcccgtccctcccgtctccctctcccctttgctggggcctagccggggatttaggagccacacaccctccacctcacgcgctaccctccacggggcttcccgcagccagggcccgccccttcccggctccccgggagaccctggcaagttccctccctccgccccgcaacctggcaccctccgcggcccttgcctacccacgcaccccctccccgcctccccctccaccgccccatactcactgccacgtccccatccggccatcccctcccagctctcggggacactgtcaggcgagcgacgcgtctcctgcggcccagctcagctgcctgggccaggatggagactccgctcatgtggggctcaggggttttttgaggattccatttgggaaaaaagccaccagatcactcactgcccagcagtgggggcttggggacccccactgctaccctttcctaagcgggagccctggcgctgcccttcccgggctgcctggggccctcttcgctcccccctccgaggaccccgcccagcaggccatgcccaggcctctgcccctggcccacgggacgcgggtccccatgcccccggctggagacagcaggcagctcggccaacggacgggccagctggttcccttcaggggcagccttgccccctctcccgccccgtctccctcccccccaccacaccgggctgtaacccgagccgccgagccactgcctcccctccggatcctccccggaggctctgcggcccgggcccccgcgccttgctgccccatgcagccctgagccccacagcaagtctgccatgggccgcggggcccgtgtcccctcggaggccccgggggcaggcgtcgagcgccgctggcttggagccgcgctggtcgccctgtgcctcctccccgcgctggtgctgctggcccggctgggggccccggcggtgccggcctggagcgcagcgcaggtgagcggcgggggggaggccaggtgccgggttgggggggtcctcacgtctgtgggtctggtctatcggggggcccgcaggacgtgtgcggggtgtgcggggtgtttgagggtccggatgtgcgtcccgaggtcggagggttggacgcccctgtgtccagttgttgggaggggtgggaggcctcgccctgctgttcagccccttcccctccactgggccgcgttcccagggacgtgcaacagggcgctcaggttaggagacccgaaaccacaggcagacaggacccgccacgcccgctcccagccctgggcacccccacccccgtttccttccagtccattttccgcggcagtttttggtcctggggaccgtcaccgatgcctcccacgcacgctttcttccctgaagggagacgtcgctgcgctgggcctctcggcggtcccccccacccgggtcccgggcccactggccccccgcagacgccgctacacgctgactccagccaggctgcgctgggaccacttcaacctcacctacaggtgcgccctggctgggccccgggggagggggcgcggccggcgcccgctgagctcactctccctgcaggatcctctccttcccgcggaacctgctgagcccgcgggagacgcggcgggccctagctgccgccttccgcatgtggagcgacgtgtcccccttcagcttccgcgaggtggcccccgagcagcccagcgacctccggataggtgggcgcccgcccccgccccggcccggccctgcgcgcccggcctctcagccccgtgctccccccaggcttctacccgatcaaccacacggactgcctggtctccgcgctgcaccactgcttcgacggccccacgggggagctggcccacgccttcttccccccgcacggcggcatccacttcgacgacagcgagtactgggtcctgggccccacgcgctacagctggaagaaaggtgaccgtccaggctggcctcctggaggcctctcctctgcagcacagtgggctgccgcggtcgggctttggggcagacggcaggagggaccttccggggtggtggctgccactggagtctagcaggcaaggaggggagcccgtgggagcccccatcccggcagccctgaactccctttcccatccccctgcgcctctggagcgggagctggagctgcattcctgggggccgagctcaccgcctgggcccagaacattcttatctttccgtggctgcggccgagggcggctccgcggctgcgctccagcagatacaccgggcctcggggagctggcccacgggcggcggggctgggcccggggctcccaggcgctgacccccggggcccgcaggcgtgtggctcacggacctggtgcacgtggcggcccacgagatcggccacgcgctgggcctgatgcactcacaacacggccgggcgctcatgcacctgaacgccacgctgcgcggctggaaggcgttgtcccaggacgagctgtgggggctgcaccggctctacggtgagtccctttgtcgggcgggagggcggggaccgggcggtcctgagccaggccgtgctccccacgctcccgacaggatgcctcgacaggctgttcgtgtgcgcgtcctgggcgcggaggggcttctgcgacgctcgccggcggctcatgaagaggctctgccccagcagctgcgacttctgctacggtgatgcccacggggccgggacagggctgcgtgggagctgggccttggccatggtcggggctgagggggcactgacggggctctttcccccacccggagcagaattccccttccccacggtggccaccaccccaccgccccccaggaccaaaaccaggctggtgcccgagggcaggaacgtgaccttccgctgcggccagaagatcctccacaagaaagggaaagtgtagtgagtgagcgccccgggcggtcctcggggtgggcagcccgcgggcggccttggggcaggggtgcggggcaggcagcggggggggctgtgcctgcaggagacgccccgcccccctgcagctggtacaaggaccaggagcccctggagttctcctaccccggctacctggccctgggcgaggcgcacctgagcatcatcgccaacgccgtcaatgagggcacctacacctgcgtggtgcgccgccagcagcgcgtgctgaccacctactcctggcgagtccgtgtgcggggctgagcccg

SEQ ID NO: 10785 - DNA, 1264 bp, Homo sapiens
  source 1..1264: mol_type = unassigned DNA
gcgcggctcgggcgcagttccggcgcagtccccgcgccgagcggctccgcgccccgcaccagcctctgcccggctccgggtgacgtcgcatcctccgattggaccacgcggcctggggggcggggtctggtccggtgagctcaccgccgcgccccgccattggtccgggcggcgcactcgggcagtggcggggagaccgcggtacccggagccccgcgagtcgttccagctgcggcgagtggagctgagcgggcgcggggccgggctgggccgggccgggcggggccgggcggggcgcgggagccagtgagcggcggctcggcgcaagcctgacgagcaggagccgagctcagcaggtccgggtaggtgcgcggcggcgcggggctaggcggagggcgcgtgcggtcgagggcggcggccggcgggggcgcgcgcggggcgggggcggggccggggcgtggggacacgcgtgctcgcgggccgggggcgtggtgcgcggccacgcgtgtttctggcgcgagtgtgcggggccaggccgggagggcgtgcgcggaccgggcgtgtttacgcgcggcagggaggggccacgagggtgcgcgcgtttctggcgcgagtgggaagtgtggggatccggcgggcccggtgtgaggggcgtgtttctggggcgagagtggggagtgagtgtgaggagcaagggtgaggggctgcagggaggggtgcgtttggccgaggagtgggtgggagacacgcgtgtccatgccgcgagggtgtgtcgacgcccgagcctgcgtggggcccggggccgtgtgtctggagtggccgagggcgtgaggggcgcgcgtgtttgtgcgaggggcgtgtgcggcgggtgtgagccacgcgtgtctgggtgcgcgcgcgggccggatgagcttctggagtggtgcgaggacgcgcgcgtgtgtctgtgtcggagcgagggcggggacgagcgtgtcgggcgcgcgcgggcggggctggggcggcgtcggggcgcgcgggggcccggcccggccggcggcgagtgtgttggggcgctcggcttctcctcaacacgggtttttgggacccagtgccgcctccttcccgcggcggggcccgcggagctcccggtttccctgggcagacaggtgcgaggcgaggtgcgggcacagccctgcgctcctcagcgggtgcgggatcgggcgacgggggactgtctctaactacagaccaggggagcggagggacgctcgattcacccgcg

SEQ ID NO: 10786 - DNA, 716 bp, Homo sapiens
  source 1..716: mol_type = unassigned DNA
ccgcttccgcggggcgggaatcccgcgccccctccccccgagcctcaccttttatggtaaagcggcgcggggcggcggggcggagggagccgagggggcggggagggcggacgggcggaggggacgggaggcccagcggctccgggctccgctggctcgggcgtcggatcggagccgccggggcgcgggcggcccaggtaagcgggccgggtgggtgggggtcgcgtccctccgtccctgtccccggtgcacacaggtgacagcgccggcagtgctcggccggagcctgctcggtcgccagccgggacccccggcgcggcgcccctggaggggcctgcgggtggggggtgcggtcctcacgccctttgcgtcccagtctcttggtctctctccccggagtcggggagtcggcaggtccggggcgagggctcagtgaggccggcggagggccgagtcccagcccgggagcgggagccggggacccggcgcgcagggcggaagctcccgcacaaaaggccggagtcccgcacatggatcgaattaaagctccggcggcgcccagcggtgaccccggcggccgccctgctcggctgcctgcggagggtcccgcgtttccggagcccgggggcgctccaggccccttttcctagccagggtcaggcaaggggagggacgggtcccggggctgctcctctctgggcctcacgcgcccgtcg

SEQ ID NO: 10787 - DNA, 619 bp, Homo sapiens
  source 1..619: mol_type = unassigned DNA
ccgtccgggactcggggggaggcgcgctgggtggtccggcagccgggggcgggcggtagcctgcaggcgtaattggcatgcacgccgttgtagctgagaccgcttaataaagcattacatatctcaccgcttccatatttcattacctcacgcggagcctgtgagagggccctaatgggagtcagctgtgtttttactttctgttgtcggccgggacgggtttctctgcggattctttgaaatgaaataatgtgatgcacgccgcgataagggccggcctgtaatgaggcccaggccgccgggcggctgctattgctccaggtgtcgcgtatttgggctgcgaggacaaggaggaggagggggcggcgccggaggatcgggggggagggggaagtcgcgaggggcagggggtgggagaaggcggagggaggaggcagggggcagggggcgggcggaagaggggaggaaggagggggcggcgggccgcggcaggccaggcgggagaagccggagacagagagaggacggggacagtggcggcctgcagagccctaggaacccgggttcaaatcctgcccgccagcgtgagagagcgtttgcccgcccaggcggtccaccg

SEQ ID NO: 10788 - DNA, 293 bp, Homo sapiens
  source 1..293: mol_type = unassigned DNA
gcggctccggcaggggctgctgcggcgactcaggctgctgcggctccagctccaccagttgctgctgcttcccaaggagacgccgccgacagcggagtagtggttgctgctgctgcgggggcggcagccagaggtcccagcgctccaacaaccggagctcaggatgctgctccggctgctgagaggcccgcaacccccagcgctgcgctagagaaacccgcccagcccagagcgggcccgccccgctgcggctcccacgcggggctgggcctcggagtttgccccgtaaagcg

SEQ ID NO: 10789 - DNA, 2748 bp, Homo sapiens
  source 1..2748: mol_type = unassigned DNA
acggcagggggtccccgtgccctccgagaatccaagaacccgccccgcttctacgcggaaagctgggagaaaaactgcttttcctttatttccccctaccccccactcatccgcccctggagctccgctcgcagatacctccccctcccgagccagaaatagacacactatctctcccccacctccctccccgtgcgcacactcgctcccctcctcctgtttgctccccgccttccccttccctccttcctctgctcggagctgcagcctgcagcctcgactcgggctggctggctggctgagtgcggccggggcgctgcccggcagtgcggtgtccacgggactgacaggcaggcaggccgcgggctgggatccggacaccaaagcaaaagcaccgctgggcgccggaggagccgcggggcttccatccttcctttgactgatttttaaattttaatttgtattttccccgccgccccgccccttttcctccgaccccgccctatcgctccccggcttccctgctctttcctttttcccggcttccttcctcgcgtttctttcccctgcgccctcggcttgcctctctccctcctccctcgctctctcccccttctctccccttcttcctcggtttcttccgtcctctctctccccctcctcctcccccgcctcctcctcctgcgctcccgccccctgccccctccccccgtgcctgcagacgcgcggatcgtccatgcgctcctcgcgggcagaatgctgggcagcagcgtcaagagcgtgcagcccgaggtggagctgagcagcggcggcggcgacgagggcgcggacgaaccgcggggcgccggcaggaaggcggcagcggcggacggcagaggcatgctgcccaagcgcgccaaggcgcccggcggcggcggcggcatggccaaggccagcgcggctgagctgaaggtcttcaagtccggcagcgtggacagccgtgtccccggcgggccgcccgcctccaacctgcgcaagcagaagtcactcaccaacctctcttttctcacggactccgagaaaaagctgcagctttatgagcccgaatggagcgacgatatggccaaggcgcccaaaggcttaggcaaggtggggtccaagggccgtgaagctccgctgatgtccaagacgctgtccaagtcggagcactcgctcttccaggccaagggcagcccggcgggcggcgccaagacccccctggctccgctcgcgcccaacctgggaaagccgagccggatccctcgaggaccctatgcggaggtcaagccgctcagcaaggcgcctgaagcggccgtgagcgaagatggcaaatcggacgacgagctgctctccagcaaggccaaggcgcaaaagagctctgggcctgtcccctctgccaagggccaggaggagcgcgccttcctcaaggtggaccccgagctggtggtgaccgtgctgggagacctggagcagctgctcttcagccagatgctgggtaagtcctgccgccccgccccgccccgcccctggctttctcctaaccagctgctggggaaggtgtggggaaagcgaagccccctccccttgcgccttcccggagggccctcctgttcacgatcaggctgtgatgggcattgcgcccagatgtgctgagctggcccacctccagatgcgcatggctcaagtgtaccttcttaaagacattacaggcgggaacccgggctcgactctggcctgcccgaggtgaggctggacaatgggatggggggtgagggggttacaggctctcagaaatagagccagaatcccaatatggcaaaacctgggactggtggaaacctccgttgtggtgtggcctgcgcttgacaggagcatcccgcattgcaaggggagcgtccagcgagagcccggatctagaggacagatgtgggagagcagatgtgagggctgattggccccggaacacagctgaggctccacttcctctgtggatcccgagtgggagcgcaagtcggatttccccgcggtgtgaggattctggctaaaagaagcgtctagggccgggggcgggcgggctgccagctgtgcgcatctgggcgcatgtccgatacctcagccccggctctggccccaacccctacacccgcaggtcttttagggcgtgtcgaaagctctgggcgttagcgccgagactcctgtttgaccgggaagcctttgccctgtggctaatggaagccgagcaggcgggaagggaggaacaaagcttgctcgagtggaggaagcgcgcagagctgttccattgttctccgtgcctgaagagtctatgcaaaaaaacccgaagcgggccccggaactgctctttctctccccggagagcccctgccctcagagaggaatagatctgggatgtgccggacgccaggcggccatgcctcgggaactggcacgggccctcttggggccacggaacaaggacggtggggcctggtgcccaggcgagctgctttggctgcgcggacttgttgcggtggctgggttgtgggtcctccggcgccgagggacccgagcttcctgggtacccggcaggctgcccgcccgctgggggctgggaaggggcgtgccaatgcgcgtgtgaaagggcggggccgagtgacgggcttggcgggtggggaacatgcaagagctcgccgggcggccctggagaatgcgaagccggaggagaccggttcg

SEQ ID NO: 10790 - DNA, 433 bp, Homo sapiens
  source 1..433: mol_type = unassigned DNA
ccgtcccggcgctcccaccgccgccgccgccgcccaatagagcccctggggcggtccccaccgacggtgcagcccgccgggaccgggaggaagcagctgcggccatcgcgccgtgcgtccgcgcccggccgccaggtgccccagtagcccgaccgccgagatgcccagcccgccggggctccgggcgctatggctttgcgccgcgctgtgcgcttcccggagggccggcggcgccccccagcccggcccggggcccaccgcctgcccggccccctgccactgccaggaggacggcatcatgctgtctgccgactgctctgagctcgggctgtccgccgttccgggggacctggaccccctgacggcttacctgtgagtactgcccgcctgtccccgcctggtcctgcgggctgctggctagcgcccagtcccg

SEQ ID NO: 10791 - DNA, 1376 bp, Homo sapiens
  source 1..1376: mol_type = unassigned DNA
ccggcaccggggctgcactcctgggcagacgctgcatgcctgtcctcaggcgcggccctgctgccacccccttgggggctcggagcgcgacagcagcttggggacgcctcccgcgcccagcacggtgcacctgggccctgaggtcctggccgaaacgcgccaagttgggggtaggtgcagcgaccccatacccctcggctgcgcgccctggcggcaggaggcggggccgggggcggggcgtgagctggccggggcggggcctatggaggggcgggaccgcggcgccctataagtactgcggagcgaggcgcgcgcccggccagagagcgagcgcgcaacggcggcgacggcggcgaccccaccgcgcatcctgccaggcctccggcgcccagcgccccacgcgcccccgcgcccccgcgcccccgcgcccctttcttcgcgcccccgcccctcggcccgccaggcccccttgccggccacccgccaggccccgcgccggcccgcccgccgcccaggaccggcccgcgccccgcaggccgcccgccgcccgcgccgccatgggagtggagggctgcaccaagtgcatcaagtacctgctcttcgtcttcaatttcgtcttctgggtaagggctgcgccgggggccggggcgggagggggcaggcacacactccacgttgggcaggtcccgcggcagcgtgctaggccccgcgggcgcagcgcgggccgcgaagttgtggggccacctgtgggctccaggagcggggtggggggtcgcccggggccaccgcgccccccgacattggggctgagggctgcgagccgagtttcggggcctctgtgctcgggggcccacctctgcggccgggccggggcttctgggggccgccgggcagttcccgctgtggtggtgatgggtgcggtggtcgcgggtcgggacccgagtacccggccgcccctcagctaaggaggggcctgcgcgggtccctggccgcggattccggactgctgcttcgcggggacgaggggggggctcgcgggcgggactcctggcgccccgcccccatgagctcatcaagagccgccgcccctggatggtggggcgggggcgcacactttgccggaggttgggggcgatccgcctcactctttccccagcccagctcactctccaatctgcggtcaccacccgagaccttcctgggggtcgcgcctaaaaggagcgcagactcccgccgggatggcccagaagctggggtgcgcgcaccctggccgtccctgcctgggagccgatctccctctcctcacccagacacgttccagcggaggcctcctcccagaagggctctggaggcctcgcaggagtggggatcccgcg

SEQ ID NO: 10792 - DNA, 3393 bp, Homo sapiens
  source 1..3393: mol_type = unassigned DNA
gcgggtgcacagggagcgccaggactccagcgtcttgccggaccagacccacacgcccgaggtgatgcccaccactaggcacatgaagtacttgagcatgaagacggcgtagtcgggcctgcgtgcctggtcgggctgcaggtcccgcaggcacgggcagttgtgcgtggcctcccagcgcgggcggttgtgctgctcgtagaagaggcaggcgaccaccaccgcggcgggcacggtgtagagcacggtgaacaggcccaggcggatcatcagcttctccagcttgtgcgtcttggtggggccgtcctgttgcttgatgaccgagcggatgcggaagagggacacgaagccggccagcaggaacatggtgccgatgaagaggtagatgaccagcggcgccagcacgaagccgcgcaggttgtccaggctctggttgcccacgtagcagatgcccgccaccgggtcgccgtccaccgagctgagcgccagcaccgcgatggacttgacgctgggcacaagccacgcggccaggtggaagtactgcgagtagccggcgatggcttcgttgccccacttcataccggccgccaggaaccatgtgagcgacaagatcacccaccagatggagctggccatgccgaagaagtagaccagcaagaagaccacggtgcacagcgcggggccggtggtctcgtagcgcacgtgctgctccaccgcgcccagctcctcgtactcgccgcgcccgcccgggccgcccgcgcccgcgcccgccgcgcccgcgcccgccgccgcgccgcccgcgcccccagcgccccccgcgcccggcgcgccaccgctgcacgccaccttctcgtggcccgccaccaggcgcactaggtagcccaccgacacgaagaggtagcaggccgagaggaagataatgggccgctccgggtacttgaagcgctccatgtcgataaggaaggtggagacggtggcgaaggtggacacgaagcagagcaccgaccacaggccgatccagaagacggtgaaggcgcgctcgtcctggctgaaaaaggggttgtggcagggcagcgcgcagttagcgatctggcctgtcttgacgcggttgtagagcgggtggcgctcgctggacacgctcaccataggcgcgcggcactggcacccgggctcgcagggagccgcgccgccgccagggggccgcgccttcccgccaccgccgccgccgcgagctgggggcgccgccgcgtccccgccgccaccgcccctgccgccgccgcggtgcgggggcctggcccccggcgggcggccgtggccgctgcccgaaggcggctgctcgccgggcggcggcggcggcaggcggcgcggcgggctgggcgcggcggtggttaggtcggtgcggttgtagtccatgcacagcgtgtcagggttgccttgctcgggcagccggtcgcagcgcatgcggtcgggccaggcgaagccgtactggcgcatgagcggcgcgcagccggccttggcgcgctcgcacaccgagcggcagggcggcagcggcttcttgtagtcctctaggcagatgggcgtgtacatgctgcacaggaagaacttgagatcgggcgagcactggatctccaccagcggccagaactggtgcacctccaggcccgcctcgtcttgcgtgtcgtggttgaactgattgggcatgtaggtgtagttgtagccgatgcccttacacagcggcacggtgatctcttggcatgccagctccttggccgaggcggccgcagcgccgctagagcgctgcagcagcgccaaggcggccagcagcgaggtcacttccaacaggtaaccccactccatgctgtgcgcctcggcccggtgccctcgccctccaggcggcgcgcagaggggtgccggggggggggcccacgagagagccgcagacgggtacagcgggtgatctggggtctcccttatgcttcgcccgggaggggggtctgccgataatctaaccccttctaggggcgcgtccgcagcggcgcggcccgcagcctgggcagggcccttccgcactcctttccgccgctccgggggtttgaaggcggctgcaggcgcgcgccacagtccgtaggtccgctctgctggccccgggtcgcgctcagccctcgcggcgcagagcggccgggcctcggctcatcgtcccgcgctcgctcgcctcctctccgcgcgcccgaccacttctccccgccgcgccgggcggcggtgactccgccggacagagagggcggaggcgccgcaagtttcctctggggccgcggtgcgcagtcaagatggctgggccgggccgcttgccgcgccgggtcagccctggcggccaccactcggcccccgggggctcatgcccgcccccaaggccaagccgccgccgccgccgccggagttggggacccgcctcggcccaggccgccgccctctttctccggcgtccgtccttcgtccgtccgccgccgggacagacggacccccgccgcctggaaaagtcagcgccgcgctccggccgcagtcgggcgaggtgcacacagtctccttcctgctggacacccaggagcaaatccagaccggaaggcggagcggacacctgagtggcgcggcccgcgcccagccgccgcctcctcctcggcgggagcagcgcccttagcccaacttcccggctccagccccgctcgcgccgcgctgccggctcatgaatatttatacagcgcggactcggtctccgcccccagccccgcgagccaatcgccgggcggtagggcggagtccacgcgctcccagggctcagccttccttaaggcagtccccgagtgtccgcactgctgtgcgcgctctctgcggatggagagttttggtaaccttgggattgaccgcagagacagagtgttggccatggctgtccccatggcgctgagtgcgtcggaggtcttggtccccttaccccgagtctgcccttggggacagggacggggtttggtgcagcgcgcgcctccccggcgcgtttcaaaccagccaagcccctgctgccaccctccgcaaatgtgggtgatctgcaggcggctggggtctcgtgctcctcggggcggcaggaaggtctcgcagcaggcgagcgccggggaggcctgccggggctcggcgctgcagaagacccgggaaagggtgtcctccttggggttctcagaacgatggtttctgagacttggagatgtggggggtgtggagtcattctaaactggggctggacccgggacggcccgggtgagatgccccggagcccagccttgggcgcgcgaggggcgcgggggacaaatgcccgccagagactctcctcccgcctccgctgcg

SEQ ID NO: 10793 - DNA, 1381 bp, Homo sapiens
  source 1..1381: mol_type = unassigned DNA
ccgcggcagcgccagctgcacttctttccaaaaatcggaggaaggagtctgggggccaggtcggggcggtttgcaggtgtgaacacctcggaagcccctggcgtcctggcccccaagagcacacctgcggctgcccacgggttccacgccctgcgacagctattccgtggctccgggggcctcaagggcggctccccgcatcggggccccaggcagcggaacctccccccagggcccattcacaaagcgtggtgccgcagagctccccacggaggggtcccagcctggagcccgggcaccgcccatctctaacccgccgctagccccggaccctcccgcgcctgctccgcaccacggagccgggcctccagagcagcaaggtcaccaggtggcggtgctggcgcagcaggcggagcgccgggtgcgcggggtcgcgcctctggccctcgaaggtgatgaagatgggtctgcgggtgagctccagcagccggcacaggccctccctgcggggcgggaccgtcaggggggtgggtgctacgctggggcccacccaaccccgcgcgggacccaccggaagctgtggctgcaccaggcccggctcaggaaggcgtccgaaagcaccacgatgaggcgtcggcagcggctcaggttcaccaagaggtcggcggagggctctgcgggagggcgggcgtcggcggcgcaggggcgggggcgggggagggcggggccggaggctcaggggcggtgccggacgcagagctctaagggaggggcggggcctgcggggtgggcgggtttttgaggcggggcctcgggtgggcggggatgggggcggagctcgatggtgggggtggggccccgggtgggacggagcatggggcggggcggggcgggccctccgggtgggcggggcacggggtggggcccgggataccagcgcgcggcaggaggtcgcggtcgtccaggaagagcttgtagccccgacgccgctccagctgcggctttaggatgaagttcacgaacttgcggtcctcggggcagtcgctgtaggagacgtaggcgtcgtagagcttcccgtctgcggacggcggccagtcaccccgatggctcccgaggcctcacaccagccctcggggtccccaacacccctaaccatctcccacgtgcacaggggcagacccgccccggactttaaccccagccgggccgcacagagcacccgggggctaacccctccccgccgcacgcctccaaagccgagctcagcagcgcactctcagggaggccgtggcgacccctcctcgcgcccacgcgggccccacgcaccgtttatctccacctccccatacgcgtcctggtaccagagcagcacgttgagacg

SEQ ID NO: 10794 - DNA, 493 bp, Homo sapiens
  source 1..493: mol_type = unassigned DNA
ccggacccgggggaaatggggtaccaacggctgggccccaggagacactcggaggggtccgcgggctcggcccggtccctccgctggggggttaccagccggccggcagcgagatacccagaggcccgtttttccaccgcgttgccatagcaacggcctggccggctgcgccccgggccgcccgccccatcccgcgggcccgccctgagccagtgactccagggaccactcaccgcggccggcggactggcgggtctccgacaggtgcgcacactcggcgcaggctgtcgctgagcccggaattctgcaccgggagaaacttttcagcccgcagagcaaccgcagggcagtggacgggggccgcgcgaggacaaacagcggcggcgggtgcaaagccccttctccaagccgcggggttggccgggaggtgccggctgcacaacggcgcccacgtgacccaggtgcagccccaggcgcgcccaagggcagctcg

SEQ ID NO: 10795 - DNA, 922 bp, Homo sapiens
  source 1..922: mol_type = unassigned DNA
tcgcgggcgctctgcagggatggagattgagagaggccagggacccggctcccttgggaaaacgcgcgggcgccctagctccccgctctgcggcatctcacctgcccccgaggaccatcgtcaagaagaggtttcgtcgtgtcactgacacctcaccccgcctcctcccgcgaggtgcctccgagcccccgaggacgcggaacgccggggctccccgccgggcaagcatcagcatccagaccccgcacgcagccctgcacccccacgccctccagggaacgccggcccgcccgtccccgggacctcccgtcccctaagccaaggccccccaagcccagtgcccgcgcgccacccctccctccgaccctgcggcgggacccccacccccgcacctctccgcggggctggctaagcctccagacctcctgcgctgcagccggctcggaaagccacccccaggtcatccccccgcgcgcgcgcggcggcggctacggtggcggcggctgcgatccgaacgggcccctccatgcaccgcgcagggcagaggagggagcggcgcctcgcacgccggggctggggcgctgggcagggcgggcgggcgtggggtcccgggtctcctcgcacctagccgcgcgagccgggctcccgggctcaggggaggggagctgaggggcggagtcaccggggcgcgcccccgcggctgcgctcctccccgccggggagcgcgggcacgtaactcggagggtgctgggccggcccggagcacgcgagcagcgggaggagggaccggggaatgactgacggaggcgggccgtagaggccgctgtgccccgccggcccgcacccggccggagtgtgcgcgcgcagcctgccagatcagcggcgggggcacgggccgtaccaagtgacggaggggggcacg

SEQ ID NO: 10796 - DNA, 719 bp, Homo sapiens
  source 1..719: mol_type = unassigned DNA
ccgcctctctggcacccacggcgcccctgcttgcctctgtccgggtctcggaggcgcgaacaccatcccaagcctgcgaccgcgcggcatcacccccgcccttccccctcctccaccccgccctttctacccctcccgggagctcctgggagtcgggccgccgtgtgcgcaagcgtgtccagccccttccccgcccccaacccgggcccgggtccccgcctcccctgcaggcggactcgcccgctcccaggccggacccgcgcccgggacagggacccggccgagtcgagccgtcgcgccagcgctgcgccgccggtcggtgcgcctagcggatcggagctgcgcgcggaaccgtgctgccccgccccgctccacccgtgagggtgagtacgcggcggcggtgcgcgggggcccgcggggcggggcggggcggggagccgcggggtcctcggccgcctgaccccagccggcgccgcgcctcccggagggggtcgggccctgcacgtgggcgcagcgcgggtcggggtggggctgccacagccctgcggagctgctttccggggtccctttccctggaccagattttcgcgggaagccggatcctctccgttcccttggagtgagcaagcgggacagttctgcggaaagtttccgcccccaatcccccagccctgcgcccggactgaagcggcggcccccacctccagcatcctcgagcg

SEQ ID NO: 10797 - DNA, 958 bp, Homo sapiens
  source 1..958: mol_type = unassigned DNA
ccgcgctgtcagcatctcgcacagtccgcccgaaacaccagggaaggggttcgtaggtgtgggggtggggtggcgaggccaggcagcctggcgcgagggagagagccgaggcctgggccaggaaggcccttgggtgccgtgtgggcgcagagcccaggagagcgcactgccaggcccggacctccccgcccctaccccgggaagaggcccgttcgccgcagggggaaggcgggatcatagcacctcggaggagcggccggtccgggcatgcgggcggcggggcggggagggaggcttccggaaccccgagagagcacccgtgcctcgcgggccccgtgccccgtccccgggctccccttcctctaacgcaggggacccagcccggggcagtgccgggcactggcgctggcgccccgctcagccctgcgatccttctccgccccgcccctccccgctccgccccgcccctccccgctccgcccccgggccgccccgccccgcaggctcgccattcccgggcaggccccgccccctgtttccgctggcggcggcggcggcggcggtgccggagcgcgagcagagcggagacccccaggtcctgcgggcgcggtgagtgcggcccgggcggcgggcggcgaggcgggtctcgagagcgtgcggagtcgcgcggccttgagccggcgccgggcgggctgggcacccccaggccgagacccgagaagggggagcggccgggggcgcccacgggaggcagtgtgggcagggcggcggtgggacgagaggacgaggaacagagtaggcgccgtgcgggaagcgggccgggaaggggagggtgggtgcggggcccgggcaccgagcgaagtggggtcctccaggggatggctccgaggaagaccgtttcagaaagggagtaacccggggccggcaagggtttccgactgtgtgaccccgtgcaccg

SEQ ID NO: 10798 - DNA, 3843 bp, Homo sapiens
  source 1..3843: mol_type = unassigned DNA
tcgtaactttgacgagaagggctcccccgctgaaagcccaactgcagagcgcccggagcgcgctgtgagtccgcaggaacgcggccgggccggggacgggagaaaggcgcggccgggaccctgcactgtgccgcgcggcgcttgcggctggaacttggcctggaacgcggtcttctcggctccagtttcccgcccaggccccgcccacccggccgccccgctggttcgcaccgctgctccggccaccgaggagcccaaagttggcggcgtcccgcggactccggcggagagcgcgagggagtcgcggccgactcctgtaccacgaagacaactggaggccggcgggggaggcgggccacgaggggctggggcgagggagctgggatgcgcgggcccggctcgccgggaaacaggttgccgcggagtcccgtcccctccccctctgcggtccccgccgcgacctgattcccgccctgcccggggagctaacccagccgcctccggggcgccctccttcttcctggattcccacggctggaccagagcccctctggcagccgggttaaaggctccttcagcaaggtcaaggcgcggccggctggcacctggggatttttttccagccgagcactggcttttcaatcgcattgttaaggatcatggcagcggcaggaaatccgaagggccccacaggtctgcgggagggaggatttattttacagcaaggaacagattcagacagatcggggatttcagtgggaggggacgagaggtttcaggacgctggaatgtggcaaaaacaaaacactccccacccatgcacatcaccatctcctgactgcgggctggggggaagggagttcagggccaatgtgtcccagacttcagcgttccccacggctgtgtcagggctggggtggcttatccccctacagacgaaaatcaagatttaaaagcatactcttactgtggtttctctatcaaagcccatcaacgtgatacacaggctgcggcgctggagggaagcggcgaaacggggagaataaacgcaacagaagcaaactgctgtctgcagaggcgagaggcgaaggaacggaagccatacccgaccccagccccatcccgtccccatcagcgccgggctagcgcaggaaaccaggaataggtgtaggtaagggtggcagcccggcagagccagcgttctactccctctaacccctcgccagcgtgggcctggatggctgggctgcctgggcatctccaagggggaccaggcaccgcgggcaggtttctaaacacgtgaagggcacagggcttgaaagacaaggaggggcgcccaggaagggcggaaaagaggggctttggggctccccaggacaccaagtcagtttctgaaaacggcgttccctggaaggccttccaacacctccgagggaagacttggagctctgaagacccaatgaaacctcagttctgactgactcctcctctgcgatcaattccggatgcccccacttagtccctgcctcggtaaccggttctttggggacagcagcatcagcacccgacgcccatcgcacaagtgggcgccgtggtgcgaggcgtatcctagctacccaggccggggtgggggcgccccggtacttacactccccaagcaggcaaactttcaggcttgtctttcgagaaccgggagctcgcatcacagttccgggtaatcaccgaggcagcttatgtaattgcccgcgatgccgctcagcagatctctctccttactcggcctcagagctcagtacatgggcaccctcttccccccaccccccaccccggcgattggaatcccgagcttgccccaccaccgccttctacaaagcagcggggtgatctcgtgtgctacaaacaccaagccagtatgcaggttcaggcaaaactctggctgcctccctgcgcccctttcactgcgtcgatggtttacagataactgcatttctataaaccctctctccacggttagggggtgggagggagttagagatcgggtgggggcttggcgcggtactgttgagggctctgcacccaactgagcagtaatacactcatccacatggacgcgggtgcataaatcgccttaacattttgccctgaaagcggagccaatttccaaagttaaggaccacgcagctgaatttccagtactttccaacctcgcctaggcgggggcaggcagagaaggggcgggcagcgggcagctaactcgcccgacccccccgccaagaaggactcactaggtgaaccccccgcccttcacccaagtagttggttgtgtattcctcggttgcgtgtgtgtgtccacacacacacacacacacacacacacacgccgccccactaccttccagtctgctcctccaatgtaacgaccgcatttaaaaatggcaattaaaatgactgaggagctcggtgatcacatttcaacccagagcacatttcccgaagctgggggtgagagtagtcatacagtcacactcacacccgggagccctccaagcgtccatctggcggctgcagcctcagttggctcctagacgaacatcaataccgcggccgggcgcccggtgaggagaggcgggcgccccgcgggttgcagagggcgaggagctggggtcgcatctccaggatctgagctccaaccaccgcccgtgcggggctgctgcagccggcacttgccccgcagggcaggctgcagccgctgaagcccggcgccgcctcgcgggctcctccagcgcccgacgggggcctggggcgagctagtctgcagaggggctgcaggcgaccgggccggggcggggaacgggatccgggagaggcagacgaacctggggcgcgccgcctccctcccacccgcttcccacctccctgccctcccccaacccttgctcccaggctccagtccgcggcgggctccgggggctgcggcggctccaggctccagaacagcttgcctcttcggccacccgcgccctagcctccctcctcctgggccaggggagcaagcaaacatctcccggagccctcggcagccgcgtgagctacccgaaccctgcccgggccagcagtgcagagggcgatggagctggcgaggcgtcgccgcggtccccaaggcgcttttccgtagagcggatcacgccgccttaccgtggctgcaggctgctaccgccggggaagcggcgaggacggcggcagggaggcaaggcgccgcgccggtggctcctctctctctcggcggcgcggctcctctgctccgcgagccgtagcggggcgcccaggaaggagcaggtccgggctctgcgctcagctccagcgagaccaacaatagctcccgcggggagcggagccccagcgagcctccagccgcgcgcgcacgaccggctcccgctcccggccgctcccggccggcgtccctgccagcactgctgccccacatgaaacagctgcaatcccgaggcttctggggggttggggcgggtgtgtgcgcgcgcgtgtgtgagtgtgtgtgtgtgtgtgtgtgtttaatagcttcccttctcttcttcccctccctgcctgctcgcctgcctgcctccgtcccccaccctcgctctcttacacacagaaagagagggcgagcgagagagagacacacacacacacgcacacgcacacgcaggttacatgaatgggaggcggtagccaatcctacgaggccggcgagccgcgcggcgcactggcgctgggagcagggccgcactccggcgcgggggggcgccacgcaggtgatgggcgcctctccgggggccacgcgcg

SEQ ID NO: 10799 - DNA, 384 bp, Homo sapiens
  source 1..384: mol_type = unassigned DNA
ccggaagtcggggggcgggctctcatagctactgcccgtcaccagctcgttattgtgctcatatagggtgacttgaccccgaggcggtggaggagggaacaaccccagagagcacatcttgccggttcgcaggacgtctgcagtcggcaaactcctggccggaacggcacagaccgcactcccgcaactcggttcccgggctagattcgtatgcggacgggtaccgcaagggacaaacggcgaggcggaactcaacggaagtgaagaaaagactaacgggaaagaaggacgagtacgcggtcccgggacagacctccaaagcttcttcctgcgccccctggcggccggagggggagcagcgcggacacgtcccccggccaaccg

SEQ ID NO: 10800 - DNA, 1432 bp, Homo sapiens
  source 1..1432: mol_type = unassigned DNA
acgccctgcgcccccagtcggggcccctccacccggcgccggcgcgcagcatgccgggagttgcagtcctcgcgaggcaagttccgcctcgtccctgcttgggggaggaggttggagagccgccctgccggcctttgaattttgccgcgaaaagcgcgcgtggcggcccccggctccgcccctcgcaggacgcggtgccgcgtcaccctggtaaccgcctctcagccgccgctgattgggctgggccgcggggggcgggcgggggacgagacgcgggggctgctgccggcgctcgcgcctgtcagtcgggccagagcggagcagcgggcaggactgcctggccggctgctccgcggagaggctgcgcgcgccggccgggggaggcggacagccgggcccggcgcctgtggggcgcggcgcgcggcacccgggcctgagaccaggcgaggcgccggcgcgcgccagacggcgcgaggctgcggccccgggagcccccgcgcgccgcccggggccatgggcgcgtgagagcccagcgcgcgcggcccctgctgcggcttgcgagctcgcacacccggtgcacagtcccccgggccgtcctcgtgtccgtcctgcgccactgggatcggctgtttctcagcgccgaggcccccgaggctgcatccgagcttgcgtcgcccgctgccgccgccgccgccgctgccgccgccgctgttcgccggcttcccctccccccacacccggggctcagagcaggaggaggaggggccggtgcattctcgccgctgttctttgcaacctgcaggggccggtgtatgtccggcgaggagccggggccgctgcgggtgcgtgcaacccccgaaggagacaatccctccacctcggggcgaacccgggggctgcaagccgcgggcgggcgggcgagcgagaggaagcaacaaagacaggctgcagctggggctggcgaaaggggccgcggccgccgggctcccagcgcgggcggagagggcgccctgggagcggcgcgggccgagctgcagccttgagcggggccccgaggggaggcgcagcgccgcccgccggacgtggcgatcacgggccccggcgaagatgcgtcgcctgagcgcccgcgcggcccccgtccggggcgggcgtgacccctgctgaacggagacctcccctcccccccgacttcggacggcgcaggccggcgccaggatagccctcaccgacagcgccccttcccacccggagagaggcatcgacccccaaggagggcttcgtcaggcagcctctgccactcctgcatggctgcgacccgtcgagcggagcgtcgtggtagctgagacctggtgcccttcgacggcctggctgatccggtgagttgtgcggggcggggttctgcgctggagctgggggcaccccctggcgtccg

SEQ ID NO: 10801 - DNA, 325 bp, Homo sapiens
  source 1..325: mol_type = unassigned DNA
acgtcagcgaaggccgtctcggcgcatctcagacaatgagcgcagtgtgcaggagcgaggggttggcagaggccaggaagctcctggggccaggcgcggctccccacccccacgccagacaaagagcgcggggcctggggagctggcggccttcccgccacttggggcgcctggggggctctggggcgggggaggcgggggctttgtctaactccgccactgccaccaccggccaggccgcggcttggcaacccgtgaacaggaggcagggctgcagggcgtgagggatgatgacaaggaagccggaggagcagcggcggcagcg

SEQ ID NO: 10802 - DNA, 1242 bp, Homo sapiens
  source 1..1242: mol_type = unassigned DNA
ccggccctggccccgcctcgcacgcgctggtgctacagctgtggtgcagacgcccttccgctgcgagggtgcggccgtctcggggcgagtgcttcccggcctgcaggaggcgaactcgggcttccccgggaggcgtccgtgggaacgcgcacctgcgagtccctgccggctgaggagccgaggtctgcgacctctgccgacctgagctcaggcgcagcagcgcagacctggccgccgtatcccctctggctgggatgcgggcccacgcgggaaaggctgaaaggtggggaacaccccggcggaaaggaaccctccctctctgctctgaaggaaagtttcccaacacagccatgttcttggtggtctccggtcccccatccccaagcccccagtcagcctcacactcatccgcttcagtagccgcggagtgggggcctccaaagaacccagctgcagagcaagtccggctgacgcagtgtgcgctgggggcggggctctggacgggggcggagccacggcgagagccgcggtgagggcggggcccgggtgggcggtgccctgagcggggctcctagtgggcggggctctggggtggcggccgttgccgggctacgggagagcgcggagccctgcgctgggaggtgcacggtgtgcacgctggactggacccccatgcaaccccgcgccctgcgccttaaccaggactgctccgcgcgcccctgagcctcgggctccggcccggacctgcagcctcccaggtggctgggaaggtaggtgcgtcgctgtccccggcgcgcggcgtcccgcgaggtcttcagccctcgccctggtggatccccgctgggtgggagccgggagtggaggcggccgccctagggagggaggagcgcaggcgggggctgctcacgggcggagtactgcgcggcgaagggaacccccgaaggggctgaccgggtctcggggccgtgacaggcggcgaggcggtgggaggggagcgtgtgaattcacgccgggtccccgcgggcgacgcgagcgacgcgacctggactcctatccgggatattgtaaatagatctgcttgtgaggctcacgactgggagcctgtcactctgcccaagcccgacccggccccggcgcccgcccgcgtcctgcggaggtcccctgagccagcgcgcggctgcaggggtctcggggccgcatcccggaccagcgccagcggcgggagagcgttgtctgtgagcg

SEQ ID NO: 10803 - DNA, 1460 bp, Homo sapiens
  source 1..1460: mol_type = unassigned DNA
ccggggcagtcgagccacccccccaaagccgacctccgggagagatctttagctggacgcctcccgccttttaggagcgatggctgcaactattccgtccgtccccacggggcgccttcccaacccttcggttggctcttcccttcgcagggctcttcccggcccaccgcctccttcctgcggcttccccggctccccaggccggaccgaggccagcgtttgactttcctggctcccagtctgctcccctagtgcccaagagcgagaacaccgcttccgctcacatgtaaaggtcgggcgcagcaaatgaagtgggaaaagagaaaaacagacaaaccgctgtggcataaaagattccttttccgtccgttttgctttgcagttcgggcttagcaggagagggttggggagaactggataaacgctttggaatccacaaaggccggtggtgtcgggggccgcaaagggagtgaagaattgaagcagtgagctggataaatccggggcaaagcactaaacaatatggatattttggcaacgcgtgcgcgtgtgggtgggcggacaaaaggactcattactcgtatgattgcctcaattctccacttcctttgtgcacgtgtgtggacgctgttccaggcccgagtccgcctcccgcccaggacgcacagctccgggccgtggcccccgcgcgtccggttgtgcgtcccgggtccctggcccgcgcggcagctacagcttggcggggtctgcgcggaggaggtcggccaggcgcaggctgccgatcttcttcacctcgcccagagcagtgcgcagctcctgcgcggacgggcagagcagccggcgcgccagctcgcgcggcaccgccgtccggtcgctgaagcgcgcggcgagcacgaaggggaaaccgaagcgcgcgcggtactgcgcgttgagctcggccagccgcagccgctcgtccgcgcccaggctcctcaggcctgcgccgctctgttcccgctgcgactcggccgtgagcgtgccccgctgcagctcgctgcccgccaggtccgggtggcagcgcaggatgccctcctggcctgcggagaagcacagacaccggcgggagcgcgtcaaccgcgcccgtcccgcaccgcgcactcgagggggcgcgtaggccgcgcccggcccccctgccccgccccgccccgcccggccccaaagaaggctgcgggagggtgaagtagagtacccaggcggtgatgtcctggcggaacaggggcgcccttggcgcgcccctctaacaagtcctggaccttgcgcttctcggtccccactacattcggtcgggaccaggatccaggggcggggcgggaagtgacacgtttgtcttttgagaccttgggtcaagaagagcggaggagagagagggcggccgctgaggctcggaatttacgactaggtcgggagggagcagagacgcg

SEQ ID NO: 10804 - DNA, 1064 bp, Homo sapiens
  source 1..1064: mol_type = unassigned DNA
ccgcgcgattgaggcgctagcggcggagctggacggcctgggaaggcttcggctcctcggctgcggctccagcccggacggcgccgcgcaactttgccatccttctggcccagccccggctacaggaggaccccgcgggcaacgcgcggagttcctggcacttcccggcggtgtctcttgttgtctgcccggggaccgacttcgcatgctctcaggctgacctgtccaagcccgaacaccgggaccatgcactcagccgggactcccgggttatcctcgcgccggacaggcaactccaccagctttcaaccaggaccgccaccgccgccccggctgctgctgctgctgctgcttctcctgtcactggtaagccgcgtcccggcacagcccgctgccttcggcagggcgttgctgtcccctggtctcgcgggggctgcaggggtccctgctgaggaggccatagtgctggcgaaccgcggactccgggtgcctttcggccgtgaagtctggctggatcccctgcatgacctggtgttgcaggtgcagcccggggaccgctgcgcggtttcggtactagacaacgacgcactggcccagcgaccgggccgcctgagtcccaagcgcttcccgtgcgactttggccctggcgaggtgcgctactctcacctgggcgcgcgcagcccgtctcgggaccgcgtccggctgcagctgcgctatgacgcgcccggaggggcagtagtgctaccactggtactggaggtggaggtggtcttcacccagctggaggttgtgactcggaacttgcctctggtcgtggaagagctgctggggaccagcaatgccctggacgcgcggagcctggagttcgccttccagcccgagacagaggagtgccgcgtgggcatcctgtccggcttgggcgcgctgcctcgctatggagaactcctccactacccgcaggtccctggaggagccagagagggaggcgccccggagactctcctgatggactgcaaagctttccaggaactaggcgtgcgctatcgccacacagccgccagtcg

SEQ ID NO: 10805 - DNA, 622 bp, Homo sapiens
  source 1..622: mol_type = unassigned DNA
ccgccagttagacggtgtttctgccgcccctgccgtcacccgctgggtcccgtcccgctccaagcgcactcccggcccgcagggtgggaatacgaggattacagtgccccacgggcgggcgggccaggatcgcaacctcggcggagtcggcgcctctgggcacctctggcttccgcgccccggccgcacggtgaccacccgggaggggatcccgggcgccccgcaacctcccggcccccgtgggccttcgggtcgccccgcttcccgccgccgcgtacccttcgcgcctcccggccctcggtgccggcccccgccccgcgtagctccgagtctttagcccggccggccccccacccgccgagcgtacccatggcggcggctcccagggctcctgcgacctgccggcgggacgtgctcctggcaggtgctactcctccgacctgacgtccaggcccggccccgttgccccaggtacagccccagctctgcgaggcggggccgccggctccacccggggggcggtgctgcggggagcagaggtccgtgctcccgagccgtcgcgcgtggacaccagccccggcccaggtgcgggtgggccccgacgggagcgcgtggcaggccg

SEQ ID NO: 10806 - DNA, 1622 bp, Homo sapiens
  source 1..1622: mol_type = unassigned DNA
gcgtttccaaaaccgagtccatcgccttttccctctgcgcagcctctatcccttcctgtgtttcgcatctcaataaacgtccccgccaagtgacttcagcctgaaacatgcggcctcccggactcctctctgtgtcaccgacctcttgcgctcagttctccggagctgccggtttaacctcgcaagtcttcccggaacccgtgccctcctcctgggcagcgttaccaccacgagcgcctacctgagaggacgcctgttctcatccagcctccaccctgcagccgagcaatctccgtaaaacgaacacctggcttagtttctgctggaaaccgttgaatagtccccactgtcttctggaagggtctgggcagctcggcgtggcgtccacggccccaccaggcctctgcctcctgcaggtcccgctacttcgtcaccaaagcgcccgccgcgctcgcatctgctgtgaggctgtgctcgggccgctcccgccgagggaacggccctcccaaggctctgcgccccaattctcgctcgtttgccaagaggtagccgtgtcggggagctagagttctccggggactctctcctgcccctcgtggccctctgtggaaccctcgttttaggatctgcacgccgtttccagtcgcgcgcgcggcacggagaccgcccgctgtgccccgcgctgcgctctctccgcccctctcccgcgcaggcctccctgtgccagccggctgtcgacccaggttaggaagcccgaggtcggggcgttaccccaagggccctcccgcttcccctccgagggcagagaggcgtccgcgcccggacgcactgcgggaacacctggagcgccggcggagctcggctgtccccgcgggagggagcccgacgcgcatccttgggacccggacccggcgcccgcgcctcgggacggatttctgcctcggctgcaggcgcagcgcgcagacctgagcctgccccgcggaaccggggctcgagtcccggcccgagcgcggcgtcggggccagcggagaggggcggaagccgcaagggaccctcggcgcctcggcctggccgcgatgaagtccccgcccctcctcaggtgacggatcgccgctgccgtcccgggctgcccaccaccccggcgcgtgcccgggagcctccaccctccccgggttctgtggccggccacgcgccccaggcacgcgccgcgccgggccgcgccaccaagcccgctgtccccagctttcctcggcagatcccctggctacccccaccctgcggaggggccgttcaccagatgccagaaaatcagggtggggcacgcaggccaggggctccagcggctgggcaccgtgtccttcccgaacctggtgctggaagtgcgcccgcctccgcctctcccaggcacccaccggcactgcccagccctgtctggagggtctaggactgaacgtctgtccccggccttcatcctggctgcagaggactggccgggtgatgccgcgctgtcctggccctgggcccgcctggaagacccgcctgtgtcgcgggccccctccctggctctggcctctaaagcgcccccggcacagcttcccggcccttgcagcccggtggggccg

SEQ ID NO: 10807 - DNA, 324 bp, Homo sapiens
  source 1..324: mol_type = unassigned DNA
acgtgggttcggagcagggggcggcgtccgcgtctgacccggcctgccggttgcttgtcgcccgcgcaggagctggccgggcgccgcctgcaggctgtcccgggccgagtcggagcgacgctgccgcgcacctgggcagcccccgggggccgcgctgtgccacggccggggccgctgcgactgcggcgtctgcatctgccacgtgactgagccgggcatgttcttcgggcccctgtgtgagtgccatgagtgggtgtgcgagacctacgacgggagcacctgtgcaggtaagagggcggcgctgtctcctccctcgggaggtcg

SEQ ID NO: 10808 - DNA, 1881 bp, Homo sapiens
  source 1..1881: mol_type = unassigned DNA
ccggggccttccagtcccgccggggcgcttgctcctcggctgagctcgtccgcagcgcggccctcggctactggcgaggctgtgcggaaccagaaggtcgaccgcgcccgggcattccccgcgcgcctctgaccccagctcggctccccggaagccgcctgggcgacttcgcggcctaatacccggctctgcgaaatcgctcgcgcctccggcccggcctggagggccccgcaccatccgcgcgcgcgcgcgctcgcacaggatccggccaacaggcgccgggacccttggagcccgccttgttagaaacttgctacgcgcgccgccgcacatgcgccctaggcccctccggacgcaggcgccaccgacctcgcttccgccccgcgccccccggctgccccgccgcgactccgggccgcgagcgctgccgcacaggcgccctaggcccctcggggcacaggcgccgtcgatcccgcttccgccccgcgatcccggcacgccccacgtcccccgcacctcagacccgctttccccgactcccactggacagccggggaaaatggcgccttaaagcgttcgcacccaccttgccgaaatgcgcggcccagtgcacgggcgtccagccatagaaggagtcctcagaggccaggtgggcgtggggtgtctgctgcagcagcgagcagagcgtggccaggtccccgtcgcggcaggcgcggtgcagcgggaaacggagcgagagcagctcctcgctggagaagcccgcctctacgcccgcgcccgctcccgccgccgacatggtccgtcaccggagagcgcggggctcgctggcctagaggacgcgtcggggaggactcgagaagccgccgccgcagcacaaaggaacgagactagcgccgcggtcgcgtcccacaggctgccgagcggagcgcgcacagagggggcggggcggggcctggagcggccgggctgggggcggggcctggcccagaggacgccttgtgcagccgggcaggggtcggggcctggagccgcggacctctggagccgccgggcagggggcggggcttgagccggaggccgcctggagcagccgggcggagggcggggcttggagctgcggacgcctggagcggccggtaggtggcggggtctagcctagaggatgcctggagcagccgggtagggagcggagcctggaccagaggacgccagcagcagccgattaggaggcggggcatggggctgtcgacgtctggagcagccgggcattgggcttgggctagaggacgcctggggcggtgggcgcctggagtagccaggcagagggcggggcctggcttgggtccacgcctggggcggccgggggcggggcctggctggaattgacgcgtggagctccggtggagggggcggggcctggctgggccgctgcctacagcggcttccggggcttggaggtcacggggctcggaggtcacggggctcggaggtcacggggctggctgtgtggggggctcaggggcgtagagtggccaagcagcggtctgagcgggtcccggggcctccggcgcggtgggtctcggctgcgccccgggtgcggaccatgatgtttccagcctgggagccggtccgggcggggaatcccggctgccgggggcgcgggttgaggctctgcgggcccgcgcccagagcgggtgggagtcacgggtctcccggaggcccagtagcgcgcggtgaagttgtccagtaaaaatttatggagcgcctacggggagcagggattctcgttaaaatctgggaatcagcaagccctagttccttacagagcaggacagattcctcggttttgtccgagggacgccttcttcggaaccgagtgcg

SEQ ID NO: 10809 - DNA, 944 bp, Homo sapiens
  source 1..944: mol_type = unassigned DNA
ccgcgtggggcccagggaggcgcgggctgcgggggattgcgcaaggccggggtttctggaggccgaggccgcggtgttttccgcgaggttattatgagctgagtgttcctggcaggcgcccagggactttccgcccccctccccccgcggccccggcgggcgccggccagaccgccccgccctcccgccagctcggaacgccctgtacttcccctcccggctgctcggcgcccgccagcggccagaaactcccgccccgccttatgcaaccggggacttcgcgtccccgctgccgccccgcccccggcctagaggacgggtctggggggagggggcgtgtggcgacgctgccatccaccagggcccagccgccgcccctccgagttgggccggtgccccgcgcggccctgcagccctgcagcgttcggggcggtgcaggagccccggggtgccgcggcgcccgcccggctgcatcgctggtcccccggctcgggctccaggcccggcgcctcccacccccaggccgcgcgcgtcccgccctcccgacgacccccagccccgggcctccgccacttacgagtccccgtcctcggtgagctgctgcttccagggctccgagccgcgcggcacctcctgcggctcgaggcggatctcctgcagctccttgaccatctgctcgtactcctcgtctttcatggagtccaggccgctgtcgtggcggtcgtccagtagccgctccttcttcagcccgtcgcgggggccctccatggcccactcctgggggcgctcggccgcctggaacatggcgcggacgagctgcgggcgctgctgcgggtgcgctgggccgcgggctgcgcgctgcttcctcgctggggcgctggcgggcgggacggcggcacggactgctgtgggctctgcagcgccgccgcggcgccctataaacg

SEQ ID NO: 10810 - DNA, 1514 bp, Homo sapiens
  source 1..1514: mol_type = unassigned DNA
tcggcggcgccccctccatccagcgtgaaacccacgaggcgcggcgtctcgagtggcgggcgggcagggggctgcaggattcacgaagccacctccgccggggaccgccttctctcggagtggcctcccctccggcgttccgctttagtaagacgacactcaggccaaacagccgcccccggccagcccgactcggctctggagggagcgccccgagggagtccagccggaggcggagaaggccactcggccagaaggtggggagccgccggcgtcccctcgcacctccgtctccacagcagggggaaaggccctgatcgccgtggtccacaccaccgcgtccacctgaggctcgcctcgcttcctgggtccctagaggggtggcgtactccgctttctcctgcccccaagtggccgcacccctccgcgggacgcttggttgggtccagggcggggcgggcgggcgctccccgtactgccgcgagctcagcgcgcagctcccgcggctcggctgccgccgcggccagttggggcgggtcgggggcggggtctcagggggcggggattcgggggggcgggtcgggtcgggaggcgtgggtggggggcggggcggacgcggagcgcccctctggctggcggggccaaggggctgagaggagtggggcaggctcggcgccggtaggaagagtcagaggggtgaccagagagcccaacgcctggtgctcaagactttctccgaggtatgaacaagaaccaggcgtctgggccctttccgctcgccccatcgctcagccgccgcgccccggacgcccgctgtgccccctgccggcggggcggcggcgggactgggtttcgggagggtttctggaagtcgcgagtcccagcgaaggcagtgcaccgctctccgcctctttcttcgccttcttctcgctcccttagctctgggtgtcgggcaccggtggtaaggtcgcttctccgtgagtcggaggtcgctcactctgggacgggcggacgaggccctagggcagccgagcccggcagcgggggaggcgtggagctcggggcggcttcagcggcgggggcgggaggctggtcctggctgcagactgcgcgcctgggctccgtgcgcggtccctggttctctgcatcgcggaggtccccggatcacagggctccctggcgggccccggcacccaggtctgtgtcgctgtggctgggcgccgggactagcacccgagtcccgcgctcccgggggctgcgccgtgccgcctgttgtgcgcgcgcagaggccggacagcccggctgcgggaagggacccgagcgcagggtctgccccgcgtcccggaaagtgcctagtctgcggagccggaggttgagctggggcagatcggcgccagacgggggcctgggtgagatacgagttgggggtgcggcctgcagaatttgggtttctggaggagcttacggcgcgctggcggagccccaggcgaacaggagcaccggattcggctccg

SEQ ID NO: 10811 - DNA, 2144 bp, Homo sapiens
  source 1..2144: mol_type = unassigned DNA
gcgtcgtttccccttcgcgctcttcgaatgtcaagtgcaccagcttccaatccctcctctgggcgggcccggtctggctaatctcagctgcagattccagtacaaactcaggactctcccccgcccagccgcccctacacaaggactcgccgaacacaccttgaatcccgcgccagagcgcagcccggaactgcagctcgcggcgcgggcccaggtcgggggtcgcgcgtctccagtcggtgactcaaggccgctcggtccgggggtgggtgtgggtcggcaggaccgaccagggccgcgcgggggcagctgccgggcgttcggtcacctagcggtgggagccgaggctggctttggccagtcgccattccgccgcgggcgtctgtctcgccgggttcccgggcgcgggaggaaggcccgcgccgcttcccactcggcgcgcttctctcccagtgcgcagtggcctggtgggtcagccggcggcggctggagcgcggggccggccctgcgcacgaatgaatgggcgcccgggggacgcgcgcgctcggggctgaagggcattaggaccgtgaggatcgctccgcgatcctgtctctccctatcacccccccgcccccccacctctctcctttttctgctctgcaggactgagcagctaggcgcgagcgaaaacaaacagctggggctgcgagcgcccccgccccggccccgagagcacgccggcccagtcccccacctggggcgcccgtctgcccaccatgaggaagatccgcgccaatgccatcgccatcctgaccgtagcctggatcctgggcactttctactacttatggcaggacaaccgagcccacgcagcatcctccggcggccggggcgcgcagagggcaggcaggaggtcggagcagctccgcgaggaccgcaccatcccgctcattgtgagtacgccccgagcgtcggccggccggctagggagccgcggcgcgcgtccagaccctgcgcggcggccgagggcgcggggcccggccagggctgagtgcccgctgcgccgggccggctttgtatatgttggagcattcctgcccgttgttatggcaacctctgccgggcggcggggctggggcgcaccgactaagggagggtgacagagggtgggggctgggagaaagtgctgcaagtttggtgggcccggcgtgcgcgcgcggctgggaacgtggcggctctcccggctctgcgctgccggggccgggagtctgggggctgcgggagcctcgtgtgccccggaaggctgccgggcccagcgcgcggcgagcgggcggtgggaaccactcgcagccgagcgcgtaggtggcagtgcgcagcccctctccagccttctgggggcagaggacatcgggtgggggcgtgggtaggggaaggctctctaggcgctgcgcctggcttcgaacccccttctgagccgggtcaacttgaacccgcttcttcggcgcggacacccagcttccccggagttctctgggttgaggagaggtctcgcactgtacgcgtctctcactcccaaccttagggtccgccaccacgggtaggtgggcagtgtcagcgcccgaacttggcgatacccttgcatgaagtcagcctcgcgacatctaagcgggcagggaaacaaaggcagtgtggcacagcgggggcggcggcggggctgcgggggcccttggcgctctggggacccgggcgggggcgtgcggagccgcagccgccctgcagggggcgatcctgtcgccgtctccgtccgagccccaggtgacagagctgtgcgtggccaggcaggggcacctgttgaggcgggaggctttggcacccgccgagagtgcgctcgagcgggcgcattcttccagacgggggcggttggtggacgagagcctcggacgaccctcgggaactaccagggcggggcagcctggccggatgaggaccaggaagaggagagccgagtggggcgggggtaaaggagtgaggaagcgtggcgattccgacaaggaaagatctgggcctgggggtggaggggtgaggagatccgcgggggaggtgcaaggtccggagggctgaggcttgtgtggagccgaatccgagaaacgcatccagacgcg

SEQ ID NO: 10812 - DNA, 379 bp, Homo sapiens
  source 1..379: mol_type = unassigned DNA
ccgcccggcggggcgccctcacgctgtgttctctgcggtgcaccgaggcgcacccggctgtcctgttgcgggtctcctggtcacctgtgggccatagggagagacgcgcccacacactctcgcccgcgcccaggacagctgcgggagccccgggccgctctaacccaatgcgtctcccgcaggctgagatgcggctgctcctgctcgtgccgctgctgctggctccagcgcccgggtcctcggtgagtgcggtcctgccccggcccccggaggaacctgcaggggagtcgggggcggggacgcgcgggcccgcaggcaacgtccccaggaaaggggcgatgtcagggaagctgggctgggaggaggcgagcccgcaccg

SEQ ID NO: 10813 - DNA, 637 bp, Homo sapiens
  source 1..637: mol_type = unassigned DNA
ccgcggcacgggagtgcgcacgcgcgtcggaggcgaaggaggaacccaccgcacctacagggcggtcgagtgagggagctgctggcgggtgggtctggcaactctttgggaggccgacgcgggcggaccggcgggtgctgggaaccgagcctcggcttgcggccggcagtttccgtgggtctgtgaagaggtcggcggcccctgcgggcgccagtcaggtaagcccagcccggtgctttccaggaagtccgtctgcgggcgcgggtagggagtcgcaccggccatggtggctgaggagggagaggttgctgcccgccggccgcccgactccaggctccttcccgacgggtccgtctcggggagcaggggtgcgcgggggctgcttctgcgcgaacggcccgggcgggggacgtggggcgcgctgggcgtcgcccgccggtctaggcgcgcgaacctggcgttcccagtgaatcacccgcggcccgggcgcccgggttcgggaccggccccctcccctcccgctgagccgcggccgagctggctccctgcaccctacccagcgtcgccgggacgcgatcacaccgagatggcaccgagcctccttcaaaggcttcggcttgttgaaagtggggcggcg

SEQ ID NO: 10814 - DNA, 959 bp, Homo sapiens
  source 1..959: mol_type = unassigned DNA
ccgcgggatcggggggatggtcgaccctcagatacgggagggattgagcgatgcccaaggagagcaggagaacactgcgcttggagacccctgagagccaggggcgggccgccccctaaagggaccccggagtcccgactctcagctccagctcttcctgtgacaccaccctccggacagagacccaagctccaggcccggccccgcccagaggttccagggagaagaccaggccaccgcccactgcccggcgtcggggaggaaagaggaggagcctctgtgtgcccacatctctggccgcccagggcagctcggctcggtctcgcaaccccagcccactggttcgggagacctcaaaggctccaccgccagcgcccccagcgctcactgtgtgcgccccaccccagccctgcctgcgcgccgctcccgccaccctcgcctcagtctctgggccggaagccccctctcctcccccgccgcagccccctcctagtccctctccctccgccgatgcgggaaaccttctccgccccgtcccgccctcttcctccagttgcatctccgcccggctcctccgtccagtctccaacccaggccccgcccctccccacccatttcccgccctgggccgggcccccggccccaccgccccctccccggccccgccccggcccccggaagcctcaccccgcccccggccccgcccccccgaagtttcttgggcccccggcagccggcgggacagaacgcggagagtcgccgcctggccgggcgtagacgcggtggcagagcccgcgcggcgctggaagcgagtggcggagcggcgggacctcggcggactcgccatggaggaggaggtgagggcggggcccggcggggcgttgggctggggtcctcgagcccctcacggggattgcggtcctgggctcaggccctcgttcctgcccgccccactcccg

SEQ ID NO: 10815 - DNA, 826 bp, Homo sapiens
  source 1..826: mol_type = unassigned DNA
ccggccgccagccctgggagcctcggttgggcgacgaagctgcgggctggggcaccggctgcctccacgggccggttctgactcaggggctcggcccggagctgcttccccggcggcggggctgactcaaccccctctgcccgaggagttgtcgcgcgcagtcagcgccccgaactcgcgcgcggcccggcgccccctcggggcccacctcccgggccagccgccgcgcctacctgtgcccgcggctcggctcctcctcgctcgcgctgccccagccggggctgaggtaccgggccgggtccccggcgccccgagtctccgccccctcctcctcgtcctccaactcgtccacgtcctcggcctcctggatggcgacgcggatctgcaccgccgtcttgggcccgggccgagcctccccgccggactgggccatggctcgcgggactgcggcgccgccggggtcctcacgccgcaaggcccagccagccggtcggcagcgactgcgacgagggggcgggggcggtgcgagcgcgcctgccgctcggcccaggggagggacaggggtcgcggcgccccgccccgcgccgccgccgccgccgccgccgccgccaccaccccgaccgctagtggagcgcccgcgcaggcggggcctcggaggtggagggcggctttccggagctcctccgacggaggcccgtcccggaaggatccccgcgacccccgatcactccctccgtcttttcgccgctgtggggccccagcccgagaggaggtgtcagggctccctcctcctgcgccttctttcacggcgccgcagggatgggcg

SEQ ID NO: 10816 - DNA, 2156 bp, Homo sapiens
  source 1..2156: mol_type = unassigned DNA
ccggccgacttgaccctctcctgttcgcgctccacggctttctggctgccgaacatccttagggagaatttgttgaccccgggttggagcatggccccgaactggcgctgcatgaagccggcctggcccaggcgcacctcggcctccgggaggatctggtcgccggcagccgcgcctccctccactttgatagcggtgtccaccgagggctgctcgcaggaggcggaggccggctgcggtggctgctggggcggcggcggcgaggctgcgggctgcgccgaggcgccggggcgctcgggctcggccgccaggcctgggggcgtcctgtcctcgccgggggacgcgtcgccctcggcgatgagccgccgctcctccgcggagtcatgcaggtgtccgtgactgctgccgctccccgtgccgccgctgccgccgccccggctgcccagcgaggccaggctcccgcggaagcgcctgcagtcgccgttcgtgctggacttgcccgcgccgcgggccggcccttcgctgtccgctgccccgagggccgagctccgggactccgtgccacccgcggccgccgagggggagggcgagggcagtggccgcagccggatgctcctgcggctggggtcttggcggcccccggccccctcctcctcggcgtcctcttcctcgtccatgatccacgccttggcccccacctgctgcgggaggctgtagagccgcttgcgcatggacggcggcagcttgtccatggcgccaggggccggggtcggaccgggccgggggcaggagcgcggcgccgcggacgggctccaggtccgcccgccggtcagtccgcccgtggggacgcgtcctttgccgccggcgtgggggcagcctcaggcgcccatgcttgggcaggctgcgcgccgcggggaggatcctagtcccgctccgagtccccgggctcgccgcgctacacctcctcccgggcccggctgggcgcggggaccccgcgctcccttcttgcctccctccctccctctggcgttcaggggcgcggcgcgccgcccggctccaggcgccccgcccccgcggggaacaatgggcgccggccggagaggctctgcggccgcggcgctcagggaaccgctccggagtgcagagcgcacggcccgcgcgggtcccgggcgtgcgtcccgcgggagggctggctgtccgtctgtctcgccgcccgggctttgtggctggccacccgcgagctcgcctcgcctcctctgccccggcccgtccggcccgtcccggggctcccgccgcaaccgagcggagcccagcgacccgccgggcttacatcagcggccgcctcccccgaagcgccctccggcagcgctcgggctcccgcgccccggaatattcatgaagccgccgcagctcgcgggttgccataggagcggctccagcagccgggcctgcctacctgggcttcttaaaggggcagcggcgcacgggccgggggctggaaaggggcggggggcgggcctggcaaggggcccaggttagaccctcgctagaccttcggggccggggtgagaggtatccacactgctgcgcccttaaatctctttcctgggctaagctgggagtgcgccccaagtctgaagctccggcttcagttgcgaattccccatcctaagattgaagggtggggggtggcttcccaatttctccatcaccaagctctgggctcgcctttccctggcatttttgcccctcagctgggtctccgactttcctcttgggaggcgaccgggttcgtctggatgcagagtcccggccttcccgcaaccctcctggagagggggcttccggaaatgcgccgcgtcggggaggctcccacggttttcctgtgacatgggcagggtgcgaaccccgcgccagtctttcccctgcaaagcctcgcagcagccaggcaaggagggcgtggggaaacagggagacacgcacagggcgcgcgggtgggacccagcccttcgaggtaagacttcgaggaaatgcgccggcaacagtgacggatgcgagatccgaacgccgacctccgcacgcgcctctccctcggtagttccgagaaagggacaagccggctgcagcggggagcggttgggccggttcctcggacg

SEQ ID NO: 10817 - DNA, 1441 bp, Homo sapiens
  source 1..1441: mol_type = unassigned DNA
ccggagggaggaaccaccgtaagcggagactccgggcggcggccggcggaagggctgggcgggaggcgtcgggatgccggcaggaccctgcgcccgagggggtagggggctcgtgtcggggttccaggcgcagattgatggggcctaagcagggaatgtgagggcggggagggcgtacaacggaagggactaatctcgcggtttcgagttgggagcaaacctcgccccccaccccccccatccgtttccctttctcagtgaagacggtttgggggcgggtggggaggcgcgtcctcggagcgccctcgcgctcccttttcgctccccgcgcgcgatccatcgcctctcttcccccgaggccagcgatggctcgggtgcgggcgaggagctgggagggcggctctcgacgcaggtgtcagatccgctcggcagtgctcggcgcgctggcccggcccccagctcctccggccgccgccccccgcccgccgcgccgcggcgccaggagggcggggccggggcgcgcgccgctcctcagcaagcgggcgggcggcgttcggtctgagggagcggggcggtctccgccggcgtcgcgcgcgctgtgtgtgagcggggtcgcgcgcgcgcgcggcaggcgagtgagggaacgaggagcggccgggtgtgagtgtgtgggagtgagagtgtgtgggagtggggtgagggagaagctgacgggacgcgaggctgtgagaaactgggcgagtgtgcgaggacgcccggccagcctgcgggagccgcagtcggcggaggagaaaggaggcggctcccggtatcccgaccccctccccctcctctccttcccccacttccagccgcccggcggcccgcgcttcctcgaaggccccagcccggctcagtcggccgagagcgagggaggagccccccgacccaggtgagcggtacgaccgctgttgccctcgggtgtagagcagtgaggcgaaggcgcgccctcccgagtgggcgagttcagcggaatggatcccccgattagcgggggctgggccggggaggggaccggcccgagcgcgcccggggtccggggctagttgaggccggtggtcgccgctccgcggagtcggtggggagcgaggcggggcccggccttcgcgcgtgtgccgggaggcgccggcccgtggcgtgtgcgtgcgaccgggcgagccgtgtcgagggggcggcgacttcgggcgtgtaaggagtatggtttccccgccggcgagggggtgtggtaaccccgggaacgccggctggagtcggacccgcgggctgctgacctgtcctcgggattgcggcgacactccccctccccccccttcccacaaattctatggagcgaccgcgggaggaggatcacgtggtgcggtcccgcagctactgtattcgattccacgttttcctccttacg

SEQ ID NO: 10818 - DNA, 734 bp, Homo sapiens
  source 1..734: mol_type = unassigned DNA
ccgaccctgggcacacagcggtaaactctgcctcgcaataccgtgtgggccttcgcgcacccctccgcgtgagcgttccgagcccggtgcagtcccggcttccgcgcgcccctgctctccgcacagcgctcccgctccgaaggtgctctgacaaccccgcaggcgctattcggagccggggcagggcagctggggctggaggcggcgggcgcgggacggagctccatgaaagttggaagaagtgattacaaatcgggacccgactctcgcagccttggcgctcgcccctccacgcaggcccgggatgccggcctcagcccccagatgtcgggaagacggcgccggccagtccaaggaagagcttccaggaggctggggagcaagggtgccgggctcctcatgccgggtcaggtctcccaggagtgccggctcccagggccactaggcccaggcctgcgcgaggagggagcgcgcgcctccctccacccacccggtcctcgcccctaacccgctctccggcccacactcacctgcctggctgcaagcgccgtcccgggccaggcagtcaggtttccatccccagtgcggcgcgctccgatgccgtcatcgggacccccgccccccaaaccagcccccccctcacccgcaactccgcccgccggggcgctcgggggcggaggcgcgagccggtcggcgtcgcggagtcggcccgcagacagggcgggcggggcccg

SEQ ID NO: 10819 - DNA, 935 bp, Homo sapiens
  source 1..935: mol_type = unassigned DNA
gcgtgcgacccgcgcccactgtggtcccgccctactgatgaccgtgaacctgtagggtgttgggccagcccctcaccccaaggctgggcaggcccccggagtccccctcggcccagacagaagctccctcaggagcgggggaggggaagggggcgcgcggtccggccccaggtgtggccgcggataatgagaccctggggatgggggcgcacctgcgccacggcgccccgcagagggtttcccaggagaccccctcgggctcccgccgcgccgtgggggtggggcagccctgctggccagagccgggcacgggccgggcgggcggcggggatcgtgaccgcggctgcgtgcgtccgcgtccgggcgcttctgtgcggggtcctggcacgccggcgggggcgacccgggtgccggcccgtgcgggcgacacgcgcgtctctgcggggctgcgcggggtccggagcggctgggggctctctgccgggcgcggctgggcgcggggggcgctcccggccgggatgagctcaccgcagtcgcgccggggctgagcgccgagcggggcggcggcggggcgggcggcggctcctcggcggctccgcggcgcccgggccgcgcgccgccatgctgggcctggacgcgtgcgagctgggggcgcagctgctggagctgctccggctggcgctgtgcgcccgaggtgagcgggccgggcaggggcggggggctcggctggtctcagccccgggcggggagtagcccctcccccgcggcaactttgggggcgcgcatggggacctcgcggcgccgaccccccggctggggtctggcaggggtgggggacttcatccaggctccagccctgtggggaagggaccaggtgcggacgggtcggcttgggaagcggcggcgctgggaccctctccccctggacaccgccg

SEQ ID NO: 10820 - DNA, 1054 bp, Homo sapiens
  source 1..1054: mol_type = unassigned DNA
gcgcggcctccggaggccgacatcacaacgtttgcaagggccggctggggtcggcacatgattcgacctcacggccgcccttaggggtggaggggtcgctacctcaggtttggggaaggaacacgaggctctgaggagcgaatttgccccaggtgtccggggaggcctggcgcggggctgcctcggttccctcccagagccggggagaggggatatcgcaggatgccggcgcccgaggcggcagcaccaggcccacgggcgccccagtctaaatatcctccgtgcccctagagcggggaccctcgctccccagacccggaagcgccgccttccccgccagggacgcctgggcctccgcagaccccgccggccggcgcgccacccgcgccagcaccatggacagcggccgccccagccgcgcgctcagggccaggcccgggctggcttccaccgcggacggctgcggggtcggggcagccccgcaatcccaaatcccggcagcccccgctcagcagggaggggccccgggggcgaagagtgggggagaagccgggaaggatccggaggaggcggcgggggcggcgccaggggaggaataatcccggcgcagtgccgatttaggttgaaaacgctcccagtcatgggcctgcacgtggagcgccggggctgggggaggcattcgcggggctcctttcccgccccgctcgggagctcacgtttgccggcgcccacagtcccgtccccacctccaggcctcagggtcgagatggagaaaccaagccgcactttgagagcccacaggagggaggggacaggctgaggagcggccgtctgggtatgggtccggggcctggcttccctcatccacacccgcagcgctgccagaaggcgctgctctgcctgtggtcagccctcgacccgtgtgcttggtgggagctgcatccccgcacaggcagccccactgctccccaatctcgcgtccacgttcctgccggcccccgctgctcctcacactcccggcttgactgactcagcccgaatatcccccaccccg

SEQ ID NO: 10821 - DNA, 1474 bp, Homo sapiens
  source 1..1474: mol_type = unassigned DNA
ccggacgctgtggcagaggaggcccgcgcgccgcacatctgctgggacccttagctcgcccaggattggtagggagatcctggaagaccagcgcccggaggggtgaggccccgtcttgggggcaaggccgcgaaaccacggcctgcagcttcacgccaggggtacaaagaaaagcgtcgccgggaacccaacacctgcagacgacgcgcagccgcagaggaggcggggcgtccgaggccccgccccgtatgctaatgaagcacacaccacaccgccccgccccggcgcgagaccggtccaacgctgcggagatccagaggccggcggcgcccggaaacacccgcggaggccgaggcagggcggggccgggcgccggggccgggtcgctgggcgggcggcacagcccgggggaggtcaacgggccggccgggcgtcccggggacgcgtctcccccacggtgcgaagtggtacggctcgcaggggcggggcccaggtcatgtgacgcggccgcggccgccattttgttctgcggtgctggtatttagagcgcagcggctgacgggccggatcgccttcgccgccgcccgcccgcaaaccttcgtgcccggcccgtcctcgcccccgcctccgccaccgcctcggcccgcagagcttgccccctccccacccgcagacatgtccgagtccaagagcggccccgagtatgcttcgtttttcgccgtcatgggcgcctcggccgccatggtcttcagcggtgagcgcggcggcgggagggactcgggggcgggggcgcgcgcgttgctcatgcccgcagctcgccggggtccggtgtgtgacgtcactctgacgtaatcccgagctgtcgggggcgcccgggcctcgtgtgacagcgggcgggggtcggcgccccgagggctgcggggagccgccgggggtccggggcgcagggcgtgcgggcctggccggggtgtgagtctcgggggtccgggccggcggccctgccagccgggtcgtgcggttgcgggggtggggcggcggcgccgctgccatattagccccgggagcggcgagagggaggctggggtgggggcgcgaggggggcggcgcgaggggggccgattctgcgggcaggtgacatcacacctcgaaggccccagtgcgcgggcggcggcgcgggtccggcccaggaacgcccagccggtcgctggagctttccggctggtggggagcccatgtcccccacgggaggtcctcagccctcgcccttatggcggccggccccgagggtcaggtgggtctcacccacaggcaggtacttccggttggagctggttacagttgcccaatacccgtgtcgctgtgtgggctgtttgggaaagctgggctgagggcttggttcggagagcccgcggagacccgggtgggagtgtgtggaagtggagggagcggggagacagcagcatcggcgctggcg

SEQ ID NO: 10822 - DNA, 357 bp, Homo sapiens
  source 1..357: mol_type = unassigned DNA
ccggagaacttcgcacacacacgcactcgcaaacacgcgggctccctgcgccaccaggaagcagccgccagaatcgccgggtgttccccaactactcctgggagacctggccccccgcccccgcccgcgcgcgcggccacggcgcctccctccctcccgggtccccaaggccggaccaccggcctcgttgtcatggcgacgccggctcatctccccccacccccgcgcgtcttcacgcccctcccccgcagggagctggggcctccctcctcccttccccacgtccgtagggacccacaggttgacaggagcagggggtcgcctgctgtcaccggccggggatctcggggtctcccg

SEQ ID NO: 10823 - DNA, 814 bp, Homo sapiens
  source 1..814: mol_type = unassigned DNA
ccgccgggagccccggggctcggcttcagccccgggctgaacaagcagggaggggagaggcacttaggcctcgcctccccgcggccttcctcccctagccggggaggaggagacccaggaagccgcgcccggctccggtgggtggagggcctaggccgcgcctcccagccccgcggccctaggcctcggcccgcccgaggcggagcccgggaggtcggggcggggtcccgggccggtcacccacctgggttgccagtcattccagctccgcgaatagttggtgccgccgctgctcagccgagaccccggggctctgcggctcattaccttccccgacacgacatggccaagcgccgccgcccgaaccggccgccgccgacaccccgctccggcccggggctgaggaggaagccgagaaggaggaggaggaggcggcggcggagggcgggggaagaggacggccgttccgggttccgcctgagcccgcagggcaggacgagggagcggcgcggtgagagaggcggatgaaggcgaggcgacgtctcttccagggccgtgcgcggcccacgacgctggggccccggaggacgaggaggacgaggagcaggcggtggcggcagctcctcacgctcacacggccactgcttccccgcctcccggctccgcccgccgcgccgccgctgtcgtacggcaagctgggagcgagaggcggggtcggccccgccgggcctggggagagaggcgggtcctgtcggcggggcggggccgatagcaggcagccccgccccccacggccccaggctcttggacggcg

SEQ ID NO: 10824 - DNA, 847 bp, Homo sapiens
  source 1..847: mol_type = unassigned DNA
acgcaaagcgcctttttctccactttcggagatggtacgtgcgcgcttccacgcagtggcggctgctgcggcgagcacgtcccctgcgggacccacgcggggagtgggctggcagtgcgcgcacagcggcggcgagtgggtcgtgcacgcggatgcggggtgggagtgggggcgcacgcgcgggcgtgggcgagcgggccccggcagtgcacacacacggcaggggcgggcgacagatgcagtgcgtgcgccggagcccaagcgcacaaacggaaagagcgggcgcggtgcgcaggggcgggcgcccagcgggcttggcatgcgcgcccccgcccgaggctataaaagcatcgccacctgctgccactagccaagccgcgcgtccagttgcttggagaagcccgttcaccgcctccagctgctgctctcctcgacatggaccctgagacctgcccctgcccttctggtgagcccccgcccccgctcgcatcctgcgcactgcgcgcccttgtacctgcaaagaaacccacgccctgcgccttcgctcaaggacacttgggggaagggcccctgattccctattcttcacctcgtgaagggcgggcatgcctgtgtcgcggagaacagggagacttggcaccccatctcctcgtgacaggcgtggggacccgagttcgtccacattaacccttcctgtggcgtcgccctctctaggtggctcctgcacctgcgcggactcctgcaagtgcgagggatgcaaatgcacctcctgcaagaagagtgagtgcggggacccttcccctctgccgccgccccctctgctctgcggagtcggtgtctcaccacg

SEQ ID NO: 10825 - DNA, 589 bp, Homo sapiens
  source 1..589: mol_type = unassigned DNA
acgggggcaggcgtggcgtctctgggactgccggaaaacgacgtgagggaaaaactcagaggctacgaaaaggcgaacagacggagggcctgcctcaggggagctaagcagctcgcctgaagccccccatctggaaatgacgtgtttaactcggcgcccctgcagctccggccgcccttttttgtttaactccgcgcccctccagctccggccgcccttttcgtcgctctcccctcgcggtcgctcacccctgagatccctggttccactgagacgctcagcttcattcggcaactcgcggacaccaagcgccacaaattcaaatacgagatctagagacgctgggtctcaaacgtctcccagagtgaaagacagaggaaccaatcgaggctcggctgacctcagacgtctaaggcgataggcgttgctaagaaaagggggtgggacgatacccagttgccaagacgacggcttccgggtgggcggcttgaggtggcttccggccgccaggcgagactccgcgggaaaactccctgctagagagactaggagatttggggctgcggccgtttcctccggagcacccacg

SEQ ID NO: 10826 - DNA, 848 bp, Homo sapiens
  source 1..848: mol_type = unassigned DNA
cgcggcgcactcccccccccgcaccacacacacacatacacacgatgacacacattcctgtgttcccctcgatgtaagtggcctcgcctctcgctgggccccaggtgcccctgcaggaaatgcggaggcgcggggagtccagggaacgggcttggggtctcaagttcgtgatccccaccctcaccccgggctccagccctgcggcgccggcccgcagcggactcaccggacgatgccgaacatgacaagcacgttgcccagcagccccacggcgcacacggccgagtagagcgcggtgatggcgattgccagggcgagggacgaggcgctccgcgcgcctggcggccccgacgcattggcgccagcgctggggcaggcgctagggtaggcgtccgaggcgttggcgaagagcgggggctgcagctcggcgccggcggagggggccggttccatggctgccggccggctccgccgcgtccctctccaccgtgcgccctgggcgcggggatccgacgcgaggggagcggcaaggcagaggccgcggccccgacgccgccggctgccgcgccccggccgccccgctgtctctgcgcctcgtccgcctgcctcgccgcccgcaccggcccagcccccggcgtccgcccgctctcctcgcccggagcgctgtgagccaggagcagccgcaggctcctcggacgcgcccgccgcgcgcaccacgtggcccggaggcggccgccagtctgcgcccgcgaccgggggcggacgctgcaccaccggctcggagctgggcaggggaggcctcccgccccctccctagggatgctccgccggctcgagtgcgaccccgt

SEQ ID NO: 10827 - DNA, 1230 bp, Homo sapiens
  source 1..1230: mol_type = unassigned DNA
cgcggcccgcatccttcctgccccgcgggcgccctgcgacccctcccactgcgtccggttccgacagaagtccagggagcagtggccctcgcgccccgtacgtcagacgtggggccaggcggcaggcccccagcccaggaatcggggagtcccctcggaagggtgtgctatccggagtcagcggctccccacgcacttcctcagagtgagaacgcacgcggcgcagccaccggcccgcttctcccaccgggggctctcggaccttcaacttgcctggggctgtctctgtccctcgggcgaggggctcctggggacccaggacacctggccacggggaggcggggcatggggggcagaaagccagatggagcgggtaggagaaggggggtgctgggaggagtcaaggagggagagagggggcgtgcatggggcgcggagttaagagccaccgagcctgggcgcggtgtgcaggcgagggccacggccttcgcagcagcggggaacgcggggagtcgaggcacccagcgggccggggaagaaggtgggggactccgcggacgccgaggagagggcactgcggagtcagcaggccctgtagggagtcggagaggggctgagcagatcctgaaggcgggcgggggacgcacctttcggcggggcagggtgcccccggacacggcgagcgcgcggtacagctcggcagggtgatagtcctccagcgccgcgtacagctcgtccgctgggggcccaggggtggcggctgcggcagggggtcccggggtcgggaccggagcggcgggcgcgacttccgagtcgggagtccgggcggcggggtccggggtggccgccgcctcctccttctgctgcagcttcctgagtcggcggagggtcatggctccggcgccggacgcccctcagagacggcgctggctcccctcggcggggctggcggcggctgggggatgccagccgggcgggccgcgggtcgcctccctttataggctccgagagcggggcggggttgggggcgggcggggagctgcctcgggtggcctcgcccccagcacggaggaccctccccgcgaggcgccgccgccctggagccccgcccacggcgctcgacggccggggaaactgcgggagctgggcgctcagtgggggaaaacgagccgcggacgcgaaggggcgggatgaggcccccggggcggggctcggggctcggggctgcgt

SEQ ID NO: 10828 - DNA, 1094 bp, Homo sapiens
  source 1..1094: mol_type = unassigned DNA
cgcgggagtcccccgagccccattggccttcccttccggccgccgccacgcggggcgccgcgtccccacgggtctagacgtccagccaacttcccggctctgcaaaagcctctgggggtgcgcggggctgggcgggggtgcggcgtggtctcccccagggtgggctccaaagctcccacccccgtccggggcgctgacaccgccgactcgcaagcctatgccgcgctcggagcgccgcggggccagcacgcccgggcgggcggcccggaggaggcggcggcacggctggggcacccccggctccgatccgcgatgaatggggcggcccgggccccgctccccgcagccccgcccggaggtcccgctccccgagcccctcgctccgcggccctcgccagtacgttgcccgggcgcttcccaaactgcccacggagccggaccccgcgctgccaacgctccgctccgggcaaggctgcggcccccgccgggccccggcgctcgctgccccgcacgtccgggcccgggaggaggaggtcgggggagccgggccgggcgccgcgagcgctgggagggtccggccccgccggggagcggcccccgagggcgcaggagcgggagccgggccggagacccccgcgcagcccggtgacacccccgccccgcgttccagcccggggtccccaggcaccgcgcgcgcccaggcggcgcatccgcactcacctccgctccgaggcccgctccgcccgccacgccggccgccgccaacgagctcccggcccgcgccgccccagcgctctgcagcggaggcgccgtcctcatcccgaccgcaggcccgcccgggccgcccgcccgccgggcaccgagccgctctgccgcgcgctgcgcctcggggcggggtgggaggagagggagcagccgccaccctgcccaggtcgccgcgggccagccctgcagccagctccagccctgggccgggtgctgggaaggccggacgccggccggcggccgcggggtctgccccccggaggctggggcggcttaggttacagactccgccgcccccgcaccctccccccagctatttttagcgccgc

SEQ ID NO: 10829 - DNA, 1979 bp, Homo sapiens
  source 1..1979: mol_type = unassigned DNA
cgtctacctttttcgcgtgttggagaactaactagcaaggcagggaatgcggttcgtgggcgcttggcctcctcaagcggctcaggctctcagagcgcgaggcccaggggctctggagccgcggccgcgacgcgcccgagggccgttctcttcgacggcagagcaagagtcaccgcgcgggagccccgagcgaccgccccgctgccccggtaccctcccctcgcagccgcccagagctcttcatgccccgtgacgcccgttagggcagcgcggccggaggccgggccggacgtggcccgagatgtccgggggcaggcagaagaccacgggcacgcgacaggcaaccgccgcctcggctctagaggtggacgttttgtctccctgcgcttcaataccagattttgtttccagacgacatccctgttgcttccggcacttggaaagaccaatcgtcaggcccgagaatgcaagacccaccctcctttgcgacggaggcagccaatccagttgctcgctacttccagtgtcgcatgcgcccttacgcaggaccctgcccaatcgttaccgggacgtcctcctagtcccgcctccggaccgccagagaggctgtcaatcccgcctctctccttcactccattagcgcactaactcacggcgctgtgacgtgcacagcccctgcggccggccggggcgggccaatggcggtggcggatacggcgggccaatgggcgggagcgtctcatgcggccggctcccgccgcagccgccgctgggtcctggagccagaggccgccctgagacggtgcgcgatggaccgagggccccagccggggaggcgccgccgccgagcccgcggccagacgccccatcagtagcgtccgcaccgggagccgcggctctcgcccgagccgtgggcgcgcccgaggggcgggctcgcctcccgccgtccctcgcagctctgccgggcccgagcccgcgccgccgccgccgccgccttgccgctcgggccgcgcggcccgggaaacgcggccgcgggctgcatgggcagcgcccgcgccccgccgctgagccgtcgcggagccgcgcagccctcggagcacggtgagaggcgccgctggtctgggggcggtggtcggggcgggcacggggcattcgcgcggccttgcggcctgcaggccttccccggcgacggagctgcgccgcgggcctccgggcgggcctggggggtcggggccgggtgggcgggggtctttgggggcccggggcgatcgtgagggaccaataatgggtcccggagcgggcctacgggtccgggttcggggcagccgggggtctttgggggcccggggtggccgtgaggggcccatagggggctccggggggggcctgggaggtcggcggagcttgggtcggccgtaaggggcggacgggggctccgggcgggcctgggtggccgggggcccgcggcggctctgaggggccgattgggggctccggggcgggcctgggggccgtgggggcccggggcggccgtgagaggcggacagggggctccggggcgggcctcgggggctcggagcggccgtgaggggcggacggggggcttcggggcgggcctgcaggtcttggggacctgaggctgccgggaggggctgccagggggcgctggccgggcgccgggttctgcggagctggggcgccgacctctgacccgcgagaggggcgccttcgccgtgctggtcgtagttgttattctcagcgtccctattattatcgctgttttgaaatgagagcaggcggctctcgggctccgagccggagggggagggcgaactggggacctgggggcgtcggggttgcaggaggcgcgcgtaggccgaggaggggcaggaatgcgggcagccgtgtggggggtgttagggggagggtaggcgggcgggtgtggggggtggctgggaggaaagcggtggcggtggcgg

SEQ ID NO: 10830 - DNA, 1930 bp, Homo sapiens
  source 1..1930: mol_type = unassigned DNA
cgcggggagaccggggcgcgcggcacgcggcgctctcacctgtggatgttcatctcccgtggagggcggtgggccttgtcgtaggagaccttggcgaagacgccggccacgatgacgaaggcgatcaccccgcaggtgatgtagacggtgaagttggtcttgtccttctccgggtcgtacttgttctcgggccccggcgacaccaccttggtgctgggcgtctgtacccacaccgggctctggtagttggtgcactggcgctggtccagcttctcgtggcgcttcttgcagcagaagcggtagtagcaggtaccgcagcagtacaggtagccgctctcgctgttgttacactcgaactccttgtcgtactggccgctcacgtcgtagtagccccagcacgtctcgtaggtgacggccgcgctggccgccgccgccacagccgccgcgggctgcccccgccggcttcccgcctccgggattccgggcgcccgggcggtgccgttcagctcgcggccgccccgtgccagggcgcccccggccctccggcccccgacggcagcgccgcctgcactcagggtccggttggcggcgcggccgcgggctccgtggacgctgggcagcaggtccagggactccagcgagagcagcagcagcagcaggaggcgccgcagcgccatggcggggccgggcgggagggcgcggggaggcttccgcggcaggccgctcccccggcgggccgggctcggaggacccgccgcgcgggccgggctggaggcgctgagcggtcagcggctccggggcgatggcgccatcgaggcgcgggcggcagtggcggcggcggcgcgcggtgcgcacggaccggcccggcgcgggctgctcgggctctcaggctgcgcgccggctccgcgctccccctgcgggctcggcgcgcctcctgggcagccccatcccccgccggcggtgactgcggccccgcgcgcggctcggctcaggcaggacccgaagcgcggctccgggcggcggcggcggcggcggcggcgtggtcccgtccgggcgggtcctgcgggacaagacggggagccggtcacggggtggggcgactggcgctccgggagcaggaggagaaccgcgggcaggcgggcggggagggtgcgcgcagccctcgaggagagagactcggagccgggaggggcgtagagcccgctcccaagacggggtcccgcggccctgcgcgcctggaaccgagagcgcacgggccgcccctccaggcgcagctcggccgcccgggtcccccagccgcccggccccgcagcgcgctcccgccgcaggctggctccctgggacggagccggttgaggctggggtccggcggcgagccgggagagcgcgcggcggctggacctcactcactcaccatgcccggctgcgactgcagaggcggcggcggcggcggcggcggcggcggcggggcgaggcgggaacgcagctgccggagcgagcgagcggagagccgccggctcgccgcctgcactagtgccggaacgtgtgcgagagtgagcgagggagacacacgcactcacacacccgcacacacgggagcgccgcgaggggaggggggacaggggaggggagggcagccgctctccgccacccacgtttgcacgcccgggcgctcagggtgcggggcgggggggactccttttcgcttcttccggatcgcagcagttgaagctccgcgtcacgaaagctccggacagcagttattcgacacggcgaacccggcgggcgaagagggggccgggagcagggcggaacgtccgctctgcagccggcccgcggcagggactgacctcccctgccattgccttctctagccttcgcgaccagtccccaccctaccggagcccggggcagcgcgctgcctgagcgg

SEQ ID NO: 10831 - DNA, 3177 bp, Homo sapiens
  source 1..3177: mol_type = unassigned DNA
cgcaggtggggtaagcccgggttaccgacgagacctgctcgcgtctccgctcccactctggtgccccctcccctccctggcagccccccccccatccgcctaccctccgggctcacttcgactcacctggcggtgggtcttcttcccccccgacccccggcggtgcggcccgtcccccttctgaccccgcgcctggccgtcgtgccccgaaggatatgggttacagaccgtgcggagacaccagctccgcgggcggctgtcctggctcaagtagaagaaaaccaccggggccagcgccgggtacggcagcccctccgcctcggagtccgcgctgcccgggtccttttctgctgaccccggccccggccggcccccggcccccgacaggtcgttgagccgcatgaagctccggggctgtcccgactcctcggcgcccgctccatcctcctcctcgtccatcctctggccagccggggccccgggcgatccggagaggggcaagcggcgcccctcagaggaggtgtcctcacgcaacccgggggccccggcgggggcacatctggtgggctctagggcgcaagctgagcccccgggagggccagttcagcccagctccccctgcccgcaggggcatgctgcccgcggggcgccggggcgcagggaaaccccgcccggcgcgagtcccgcttcccctgcgcccctggggcttcccgggccagccggccggctccccctcactttgttccggcttcttcgcttcgcgcccaggctccggttgccggattcggcgctaccttcggcgaagccgccccgagagggcgaacgaaaaggggggcagcggcggagggcgggggtccggggaggggcgccccctcttcccgcggcgcagctggagccggatctaaggggtcagcatcgtcccggctccgcgccaggcggcgggggaggggaggagggatctctttaggggtgggcttggagggggtgggggcggctccttcccccgccccgccgcgggctcactgtccgggaggggcggggagacagtggggggcagtcccgggcgggagtggaggcggagatgccgccgccgcagccgccgcggtggctgccgctgccgtagctgtcgccggcgccacagcctcctcctccggccgagacgcggagcgagcgagcgaaagcggcggcgaggagccccgcgcacaccacagctggatccctcacttcaacttcaagcctcggccccgcccccagacagccccgcagccaatcgccggacgccgccggccccgagccgcgcgcccattggccgtccgccgtggcagtgcgggcgggagcgcagggagagaaccacagctggaatccgattcccaccccaaaacccaggaccgcccctctcccctccccttgcccctgggtccgctcccgaaggctggagccaatcagactgctgcccagaccgaacccactttcctattggccattggggtctttgggactcccttggagggagcccgaagaatcagagtattcggcgcggggtcctggcgtagggccgcaggccccaggcatcctttgtccacgacccctgatttgggcagcagccggaggacggagctcagctctgggcgggcctggggaagaaaggagacaggcggcacgggggtgagggttgtcaccagggggtcccagagcgaaatcccaggtctccacctggttaatctcccaccctggagttgagcttggctgcgggactgggggagggaaggagcggagctggatgtcctgggggtggggcttcaggctggaggggcccagtcttggagaaacgggcggagctcgagaaaggctagggtaggcatggtctgggcgtggcctccacaaatctcttgggcttattggtcatactcccgagtcaattctgagacttcgaccctgacctcgtaaccctaacccgctggacctgacctcacattgacgctcctgggcttcatccctttgcccctagggaccttttgaagggcgtggactccacgcaggggcttcgtgcttgaacacgtggccccaggcaggtcgcgctggaccgcagagcccggatccccaggaggggctgcggagcagagcgaggacccctaagaaggaacctgtgggggtctcgagtgtgtgggagggggcggaagcacagagctgggctttatcgactcgaccttcaaagtccccaccaccgccaccccccaacttcgtgcctcagtttctcttaagtccctatgtggcttagggaaagagtgtccgcggaactggaacttcgcgggtctgccgccttcactcactcaccttaaccctaccggcagcgggccctcgtgggtttgtgctttccacgcgtgcacacgcacgcgcagaccccggcccttgccccgcctacctccccgagttctggggctcagtcggctctagctctctcctgccgccggcgccactccagaaagctgtgggtacccgggagcggagcgccgcgggtgtgctgggcgccggtggaggggggaacagcgaggattagacgccgggaagcacttccccaacatctgcgagaggtagacacggcggaacctagtgggtcagtcagttccctctccggagattttggggcgcttgcgccactgcggagaggcggcgggatgggtcggatgacctccatcaccacccctcactttgctgaggccatcacccctgggcgttgttcactctcctaaggctgcaccacccacgcagcccccgcgcacctcccgccaccgcagagggttggggtcgtctcagttcccgccccggccgatggggggaggggatgggggaagtggcagagtggctgctgcgccgtcgtctccctggttgccctttcgccgaatccatgcacagagttgtgtaaatgaggccgggcgggctcatttgcatttcatgctaatgagcagatcccctaagtgcctttttttcctggcgggagtctctgctctcattctgagtatgcggcgcctgagtcttgaaccccgtgccgtcttctgggaaaggggggctatttatggttgctccgcgcgtctgacaccttcttccctcccgagaggccgcagtctgccgggtcggcctgcccttcccgccaggatagaggccccggggctggcgcga

SEQ ID NO: 10832 - DNA, 2195 bp, Homo sapiens
  source 1..2195: mol_type = unassigned DNA
cggcagagaggacgccacccacgagagagagtgaccgcggactcccaccgagaggcaggcggtggaggggctcctcttggagaccccgattatggagtggtttcccctccctccagcccgagccgcagcgccgggctcccccacccccccagtccccagccggctcgggtttgaaaactttcagcgaccgagcggagttggcgcggcgtccccagcccgcaggatgtccagtccccccgcctctgccctcgcccactccccgccgtcccgacccgactcttccgggcggcggagcgggaaggcagcagcccttacctgggactcgccgccggccccgctccagcgcagcgtttggggccaactccagccccaggcggggggcgggcgggggtgggagggacgcggcgcggggcgctgggccaggcccggtcctggctgggatggcggggcccgggccgggacgcagggcctgcctctccctgggaccgaggctgagccaggcgcgctgggttgctcgctctcgcgcgggcctgtccccaggcagggctccttgctttcggcgagggtgggctggagcctgcatcaccgttacatcacctccattcagggcgctaatcgggcgcccgccgcgctccaggtacgtgcgctccgtttacacaggaacaaagcctgcccggccctccccgccccgactcacctccaggctgagccgactcgtactttccggctggtgagggagatgggagtttctggccctgccggcgtgtgggttgttgctgttgactgccacgcccccgcatgcgggcgcgcgcacactcacgcgcactcactttctgggctcggccttcgccggggcaattggtgtgagggtgcagccctgcgcaccccccaccgcgtcttccagagagcgcgcctacggacacgcgcggggctaccttggcgcgtctccgtgggggacacctagcctttgtcaccttcgtcctggccctcccgtgagacacacttcaggcacagttcgctgggagcgggccggagcgaggcgcacactcaagacagagtccgtctttgtcacgccttctgcgccccctcccctccccagcttgcacacgtggacacaccgcacaccgaggttcgccttttgcacgcacggtccttctctgggacctccaccagtcaccaagcgtacgtgggatcgtcaccaagcgctcctctcacgcgtgggccgagtccagaccactctggaccgtgggcaaaggtccccctcggcccgactaccccgcgcccgggtttcctgtgaccgttccaggttctgcccaactcggagcgcgctctcccctcccggcgtccccgttccctgctccgacttgtcctaattagccttcacggttttgttccccgaggtacagtgtttagcgcgaccccctgggcctctgcgctccgggacacgttggctctgactccgagtccgtcctttccaggaggtcaggttcccaccagccccaccccccactccctgttccggggtggatctgtgggttgccaccctttcccctccggccccaggaatctgctgaagctggaccgcagaaattgggaagcgaatccaggctggtacttatccagcccgataaacaagagattttccggccgccttcccccggggctgctggcctcgcggggggtggggtgcgcagtcctgggggcccgcagcgaggcctagttagcccgcgccagaggcccgtaggggctgaggcgcacagaggagggagaggttgttgggcctggccagggccctggagacgcggagggagggcagggcgccgagtctcggggtgccggttctcatgacgccgaattgcctgggggatcgccagcggtgcgccggtcggagccagctggtggcggggcgggcggcccggagtgtttgctcaaccctgagcgcccgcgagggggaggggaggcagctggtcacgggctagggggtagcaaggtggaggagcgggggctgggaaaggggagggtatctcccgggctgcttgtttgcgtgcctgccgcggtctacgacaaccgggagtctaaactctatgaatcacccggagttgctggagcgataaacctcaggctggttcctcccctcgcacaccggcttctcggactcctggagggaatgtttgcttagcggccggagctggcgg

SEQ ID NO: 10833 - DNA, 2063 bp, Homo sapiens
  source 1..2063: mol_type = unassigned DNA
cgcttaaagcagaggcggcaaccaggcgctcgggttacgttatctgataacaggacagatgttgtacggctcgttttcctcatacgcattactccgcagtccgcagcaccgttagaaaatccacctgatttcagagccgcagagcgcccaggggtccttctccgcccacccgcagcacgccccgggtttttctcttcccccaaacaacggcaccgggctcctgcaccaaaacacggcgggttcgcgcctgccatcaccagtgcaaaatctgcggggggctgcccggaaaggaccgaatttcaccgctgcatgagttttaaaagggagggggcacatccatcttcagccctccattccactcccgtttgattgtgatgcacaccgggcgtctgcacagccccgtctcacactagcacacacgcgccccggccccggccgcttcccgccgctcccctcaaacccggccggcccggggcctggcgccgcacgcgggtcgctaggggccagcgcccgccccggctcggctcggccgaacaaagggcccgcgaacctcccggcaaagttgcggctgcggcgaggagcgggcggactgccgcgctcacctgggctccgtccccggcggcggcggcggctccgcggggctccggtggcgcgggcctggcggcggcggcggcacgaacaaccgcccgagggcctcgggagtgcgcgggcggcgggggcccgctcagcgccggcgccacggactcaggtcccggcgcgggcggcggcggcggctgcggcggcggcgcgggcgagtgggcggcggcgcgtcccggcaggtccaggtccggccccggcaacgccgcgacgcgtcctcctcctcacgcccggcgggatgcggctccggcggggtccgggtcctaggcggcggcggcggcggcggtggcagctgcggacggctgggcgcggggccgctccgctccctccgcctccggctcgggcgggcccgcggctactgcgacggtgacggcggcgggagcgcggcgggcgctgggactgccctgtcagggggcggcccgggcggcgctcaagactgcgcggcggcggggccggcggcggcggctacggctcccggggccgtcgcgctgaggtgcggagctgccaccgcggccatcttgttgctctaactgacaagaacccccctccccccgcttcagccagacggggcgctcgcgcccccttccccgccccgcgttggcctccaacaggaagtcgtcccggcccctagcacgtgactcccaccgtatctgcataccggagggcgaactggccaatcggcactctgcacctgagctcctcccccgcgcgcccctcccggcccattggctcctcggccaggccacgcctcctcctttccccttaatacccgcccgcgctgtggttccctgcaccgcgcggggagcgcgccggggtgcgagcggtgcgcgctccgagtggccgggacgcgcgccagtcctgggagcttgcactgctcgggggggttacgtggagacttgcgtggtgtcctttaccgccgccgcctgccctccggtccctgggcgctgtggctccgcgttagggtgctggcgggaggggtgccgatccggttctgcgcgtccggtgggttctccgggccagcgccccgcggcgcccgggctttatgctgtaattgcgcccggcggcgcccggcgcccgcaccggcgcgcgtctcgcccgtgccgtgcacacgccctgcaccgccccactttgcacacgcacacgcacacgagtccttggggccctggagcatcgtgctcgcctcgcgcctcccggcccgcccttgcgctcagtcgctccccagggagcgcccagctgcgagcaaaacaagcctcgctgcgaaacagtcccccggggagacagccctttccccggagcacagacaccacaccttcaccgcgcaagccttcggtccgggccgaacccgggcgctccggcgcctacgcaccccacgattcctccccggtgctccgtacgccgccgtgatcctccattccacggctcctcga

SEQ ID NO: 10834 - DNA, 816 bp, Homo sapiens
  source 1..816: mol_type = unassigned DNA
cgcagcaaagagctccgggcgccctgggggagagcggtcccaagcctcggaaagtgggcagagccccctctcccagggctgagacggcaggcgcggggctcccctcggacccgccccgccaaggggacagtgtaggccgtgccgcgatccagacccgacgcctccgcgggctccgcggcgcccgggctgcctccgccggctgggagcgctcgagtggccctcgggaactcaccgtgaagcaggagggccgggaacaggtatctgagcaggaggcggcgcggccaggacatttccagtcctgctctggggcctcccgcacgccgcgctccgatttggtgcccgggcaactgggcgcgcgctctgccctccgcctccggccgggtgcggccgggccaggccggggcttcaggcggctgccgcgcgccccatgcccggcgggctaggcgcggggctgcggggcgcgcgctctctgggcgccgtcgggcggctgtgggcgccccggcccggtccgcgtcccggcctctctgccgcccgccccgacttctccgcgcccggccccgcgtcccgccccggccgccgcgtgcgccgctctgagctgcagtggccgccaccgccaccgcagctgcagcgtctcttcatatttccagcgcgccgccggccgggcagcctggccgcggcacggaggaggggccctggagggggcggtcgggggaggcgacgccgagccaccgcccccgggcagccgccgccgggggggagcgcggagacttgaaagggcgcgtcgggcaacgcctcccctcctcccactccgggcgc

SEQ ID NO: 10835 - DNA, 368 bp, Homo sapiens
  source 1..368: mol_type = unassigned DNA
cgtgccgtctgcgtccgtgggctacacacaccccctcttttctcactgcctcctgggcggtgtggatcagctgcagagtgtgatctgcggtcagggagtgccttcccggagttttcgctttcagacccctggtgttaaagacgttctgtgagcgggtggggccgggcgccccagtcacggcggccgccgcctcctcttcccgcaggacgggacagcgcccctgtggatcgcgtcccagatgggccacagcgaggtggtgcgggtgatgctgctgcgcggagccgaccgcgacgctgcgcggaacgtgagtgcccgagtcgcgcggccaaagagcgaagcctcccggcgcgcctgtgtggagaaaacgg

SEQ ID NO: 10836 - DNA, 1411 bp, Homo sapiens
  source 1..1411: mol_type = unassigned DNA
cgtcccccgcgctcctcccgcgcgcggcccctggagtccctgaggcgcgcggccagcccagctcgggcccgcagcaccgggagcagcccgccggccaagcgagcgcgggccggggccggggccggggcctgggggcgccgcccccgggagtctttctgcggcccctgaggagcgagggcgacggcgaggctgaccggggccgaaaccatgaaccgaagttttcacaagtctcagaccttgcgattctacgattgcagcgcagtggaagtcaagagcaaggtaagccccccgcccgccccggcggccctgcgcccagtctcctggctaatgaatggggcgccccgcggagggggactggggcggcgtggaggcgacaggcgccggcgacaactttccagttcgggcgccgcgcgccgctccgcgggacgcgcactggggaccccggccgtccttcccgccccccgcgcggacacaaagcccggcagccgcggcgctcagagggccgagggccatcggacagtccgggcagactctggacccgctccgcgggagctgctcttttgttccacgagtgagaggcgatcggggcgcgccacacattggaggggagggcggcctttccggggcgagttgagggccaggggctgctcggattcggggccgtgggggggctctgggggcccgggccgtgggatggccctggccaaggcgccttcaaggctgcaaaggaggcttgttacctgccaggaggagacttgccgccggctccgagcccggcgtcccccacccgctcggtaccaaacatctaggcaccaggcgcgctcccccgcgcagacccagagcacgcacccggctctcccccggcccagacccagaccacgcctccccgggcgcgtccccgggccagacaccccaccccacccccacgggcgcgcccccaccccagactcccccacctccggacgcgcccccgccccagacccagcccactcccccgggcgcgcccccggctcagacccagacccctcccgagcgcgcccccggatcagacccgtacccagaccacccccacgggcgtgcccggcccctcccgctgcctgcgcccgggcggagcgtgcccgaacttgcgggtcgcgatgcgcgtctgggtaattggctggtaggatctggcgcttctgccctttgcgggggtggttccttcgccgcagatgctattgtttgtgagggtctccttggtggaccccgcgggctgaggaggtgctgcagttgttcggggtcctgcgggagggggcccctcgagtctttcgctggctactctctgggagttgagcggccctttcgccctttctttcttcgcaccccggttctcagagttgtgggaaaggctcctaacggcggagtgggagcccgc

SEQ ID NO: 10837 - DNA, 1487 bp, Homo sapiens
  source 1..1487: mol_type = unassigned DNA
cgggccctgcgactcgcggcggaggcgcacagcaggcgctcaaacgatcgtgggttcagggccccgcgccagcgttcccggggccttctggagagaggcagggtcccgccgccccggttcccgcaggaatcagctggagaaaggcgggcggcttggggctgaacttcctccaccccccatcccccccgccgcctggagcagacacgtcgccgccgcgcccctgggaacggtcagggaagcaagcagaagccgggaagccgcgaaagaggcgagaaagtgcgaccccctccccagatccccggtcccccgtcgaaatccctgtcggccggtcaaaccctagacaatggaagctccacgttttcatcctcattctcccccacaagtccggtcgcgggttcccctcggcccgggaccccggcgccagccccggagtcggagcctgcacgatacgccccctcccgccgctccacttctccacccggagatcgctcaccccctccgccccatccccccatttcccgcttggccggccccgcccgacccggaggcggcgccccctcccctgtcccaggcccaggaaggaggacggcggaggaagtagggggtcctggctgcgggcgcagggatgtgggtcggcgatcggcgtccgagggcgtaaaaaggcggcccgaggactgcgcgcgggcgggcagcgcgggaagccgggaagaaaggagggcgcgcgggggaggaggctgcgggtgcggggcccgaggccggggcgctcactttctcgcgccgctcgcgctcgccgtccagctcccgctgcaggccctgcgcgcggtcttccgcctcgtccgcctgctgctgcagggcctggatcttgcgtttcaccgcctccagggagttgaggccggccatggcgcggaggcgcagaggcgcacgggcagcggcggacgctcggctgggctcggctccggcgagagctgcacagccgcgccccggccccccaagcctttgcctgcgcgggggccgcccccgcctctccccgccccccgggccggctgccgtcggggcgatgaggtcacccggccggaccgccgacgtcagcaccgctgggggagggcctgacgtcggcaccgctggccacagctgctggaaagtgccccttttcgggacttatttggagaaagcgctgggaggcgccgccttctcctcctcctcttcctcctccccctgcggctctccccgccttcccggccccggggctccggcctggccccgccgcgggctcccgcatccctgcacacgtacgtcggaggccttcttctccgtgagctccagcttctcctgcgcgtccttcaggtcctcggaatatttatccagctcgtcctctgtcccttttagtttcttctggaggtgcgtcagctcctcctccacctggggacgacagagcgaggaacgggtcagcctggggggggggtcacgtccccgaggtgcaggggcgg

SEQ ID NO: 10838 - DNA, 602 bp, Homo sapiens
  source 1..602: mol_type = unassigned DNA
cgcgcaccgctgctgtacctcccttaacgtatccgtaacctccctcaacgtatccgtacctccctcaacgtatccatacctccctcaaggtatccgtaccttcctcaagctatccgcaccaccctctcttccatttcatgcgaagattgtagtcccgcagccctgcgaccagcggccggaagcagctaagatgctactgctcccagcatgccccgcgaggcgcgcacagcacaggccctctctcaaggtcaccacctccactcccgttgtatgctgggattgtagtccggccgccctgtgactaacggctggaaccgcctaagacaccaccccagccagcatggccggcaggagcgcaccgcgctgtctccctccagggatccgcaccgccctacaatcctgctttgtgctgagattgtagtcctgcaggcgtacaactaacaagctgggtgcagataagagactacagctccccgcatcccaagcaaaggtccctcctctacggagcccctccacgcgtccactgcggttccgccgtgccaaggggagcttggctgttcacgggcctcacctgctagcgagaagatagcttggccgggcgg

SEQ ID NO: 10839 - DNA, 628 bp, Homo sapiens
  source 1..628: mol_type = unassigned DNA
cgcctcaccgagaacagaaagtgcgctccaggtaccacccggattccgtcaaactacattacccagaaggcagtgctacaagggacggaagccgaccccaagccatagacggaaggcgcagaggggcgttcccgtagcggcgtgggcgggacttccggcgtccagtcttcgtccgccgttaggttgcggctgctgtggttgccaacgctacactgggtagaacgccagacaggggccacttttcgagaccgagtagagacggacagtgaggaggataggacccacttacacgcttttatgtcagccgcgatcccacccccacaagcgtctgcaaaacccttcctggggccttggcgacagccctgtgtcctcacggcgcgcagaggcggcgccgcgaaccttgtgtgcattttacacgacggcggggactgaggtccctcgcagcccagagccggagcccggggtcggccgagcccgcaggaccggcttcctcgccgactctcacggcctcacccagccccctgggcccatggcggcgccggcgttggtgagtggagggttccgcagcccgcgcgagctcgggtcaccgcccgcatgcacccatccgctgtaatacggcggatgccgg

SEQ ID NO: 10840 - DNA, 215 bp, Homo sapiens
  source 1..215: mol_type = unassigned DNA
cggctgcgtattgatcgcacctgtcatgtcccatctcccctaatcgaagctgaaggccggctccgatgcctgctatttttcataattccaccgcagccgacagctccacaaacaccaccgctcgctcagcctccgcctccccgggccggctgccacctcgcgccctcggcctggccctggccccgccggctgcactgcacggcccgtccctccgt

SEQ ID NO: 10841 - DNA, 2638 bp, Homo sapiens; identical to SEQ ID NO: 5586
  source 1..2638: mol_type = unassigned DNA

SEQ ID NO: 10842 - DNA, 2172 bp, Homo sapiens
  source 1..2172: mol_type = unassigned DNA
cgcgcaggctgtgtacgtgtttgtgtgtacgtgtttttcggtgtgtgtttcagtcccagtgtgttggcgcgtgttcgagtacagatacaccgggggtgtttgggtacccgcacatggctgcgggtggggcgcagtggagaggaagcccacacatgcgtgtgctgagatatggccgcatccttgtgctcccccagcccagacgcaggggagaccagcaccgagacacccgagctcgggagcccttcagcggcggccgggcggagcttggctccacgtggggctggagagcacgcaagcctggagtctcggcgctcgcttctcggctgccgccggcttttgtagaaccgagtggccggatggcagctcgcggggaggctcggccacccgcccggctcgcccggggcggggagaagaaggagagctggagagagaaccggccgcggcggtcggagaggcgagcggagtgcaagagaggcgagcgcccctgcccggcgcccgggcgcgctctccgccttccccgcccggctcgcctgctcgctggctccctccctctctccctcccccttcctccttggccctgcctcctccctcgatccccggctggatgactgaggcatttcagacgtgggctgaaccagagcgagcgagcgagctcaggggctgcagcgatctctcgataagccacctagaggcgactctgtgcgcgcgcgctccccagtggctcccgcccgccctctgatcatgttgacatattcacaggacaggcagtagtaccgatgcggcgctgcgacgttacagtttccgacaccttctttttataactcagctctatcccccagcactcgacctgtgaaaaccacgcctatgcagcaacacaattggtccgaaagcgtcaaagagccaatcaagaggcctccggctccccgcagcccacagcgcagcccgaccttctagagccgccgagcagacgcccggtgaattctagaggcggcggagggtggcgaggagctctcgctttctctcgctccctccctctccgactccgtctctctctctctctctctctctcccctccctctctttccctctgttccattttttccccctctaaatcctccctgccctgcgcgcctggacacagatttaggaagcgaattcgctcacgttttaggacaaggaagagagagaggcacgggagaagagcccagcaagatttggattgaaaccgagacaccctccggaggctcggagcagaggaaggaggaggagggcggcgaacggaagccagtttgcaattcaagttttgatagcgctggtagaagggggtttaaatcagatttttttttttttaaaggagagagactttttccgctctctcgctccctgttaaagccgggtctagcacagctgcagacgccaccagcgagaaagagggagaggaagacagatagggggcgggggaagaagaaaaagaaaggtaaaaagtcttctaggagaacctttcacatttgcaacaaaagacctaggggctggagagagattcctgggacgcagggctggagtgtctatttcgagctcagcggcagggctcgggcgcgagtcgagaccctgctcgctcctctcgcttctgaaaccgacgttcaggagcggctttttaaaaacgcaaggcacaaggacggtcacccgcgcgactatgtttgctgatttttcgccttgccctctttaaaagcggcctcccattctccaaaagacacttcccctcctccctttgaagtgcattagttgtgatttctgcctccttttcttttttctttcttttttgttttgctttttccccccttttgaattatgtgctgctgttaaacaacaacaaaaaaacaacaaaacacagcagctgcggacttgtccccggctggagcccagcgccccgcctggagtggatgagcctctccatgagagatccggtcattcctgggacaagcatggcctaccatccgttcctacctcaccgggcgccggacttcgccatgagcgcggtgctgggtcaccagccgccgttcttccccgcgctgacgctgcctcccaacggcgcggcggcgctctcgctgccgggcgccctggccaagccgatcatggatcaattggtgggggcggccgagaccggcatcccgt

SEQ ID NO: 10843 - DNA, 2548 bp, Homo sapiens
  source 1..2548: mol_type = unassigned DNA
cggagctgcagtagaagcgcttccgacctcgtccaggccctcagcctatcccctcctgaaggtcggcagggggcgtcattaccgttggcttctccgcgcggctccggcctccgcttcgggaaccgagtgcctgcagcccgcgatcctggggaggcacagggttagggtaccgcctcggcggagaaagtggctgtgccgcgcgggtggggccgggccagggctgggctgggctggagggcgcggggtacctgagtgaagccgcagctcccgggcggggtgcagaggagactccctgagcgctggagcggggagagccagggcgggggccaggcgccgcagtcccggacgaggcccgagcagctcctgcgcgttccgcagcaggcccagcagcgtgtgcgccagcgagcgcagctctgcggaccggacaggagtcggagcggcggtcagaggctggccaggccccctcccctctgccccccgtccgggtccgggtgaacagaactgaccgcatcgccgccggcgctgcaggcactgctggtgcgccaggcgcgcacaggcgccctgggaccccgggcacaggcgggcatagaaggcgcagagccgggcggcgtctgcctgcagctcctggggggggtcccaggccagaagctccctgcagctgggctcgcggctggaggaggctgctgcgggcgggacaggggtcagctcaccctctgtttggggccctagccccctcactccttccccggaaggagacaggctttcccgaggcagaagggagctgggaatgggcatgggccgggtggaaacgggcttgtcccacggttgtccgttggggcactggggacggggcattggaaagagggcgctcaccgctcatctgctcctggagccagtccttgaacactgccacgcgggtgtagaccccgggcttccctggctccccgcagccgtccccccaggaggtgactccgaacaggacctctctagggcgggggccaggctcagaacaggtcagggggcctcccgagtcaccctgcggggccaagagagaggacgctgcattcacctgccccctatgacgcctgccttacgcctggcaggtgtgagcttgccacttgtgtccattttagggatgaggacagagaggctcagagaagtcgagtgacagacagacgtggaaggaaaagaggccgtagtggccctgggaaggctcagccggccttttctcatcagactgggttcatacctggcacgagtcaacgccccccgccaggtacccggcgcagagcatggtgctggggcgcagcccgggccccagggctcttcggcaggtgtcggtgctgagcaggggaacacgggcctctctcactgcttcagcctcaggcccgtctgcagggaaggggtggaaggctcaggtttggagggcaagagccccgccttgagggtccccttcccaccaccccccttgattcctccccctttgaaagagcaggcagcatttttccaaggcaacccggcctccctacactctattacctcggacccccagttcttcccaccacgcgccggctcacccacgcccagtaccttcgaagagggcgccccagcccgcgatggcgcaggcggttccggcagggggctcctggggctcctggggcaggcacacggggcgcgccgatccccccgggctcaccggcgtccacagctgcaccagggccaggtcgttgtggaaggtccgcgggtcaaactgaggagggggaggcggcgcagggtcaaggaagcacgggtgggggtgcggtgcccagccttgggggcctggggactgccttctcaccttggggtggggcaggatgcggttcactggcacctcctccgcttgctccccccgggacccctctgccagcgtcacagtccacagaagctcattcggggcgctgcgggtcgagcggcagctgagacgcaggaaggacaggggcacaccccgcaggcccctcggagaccctgcccctccgcccgcatgccgggctttctccacctgggggcacggagggcgggccggggaggggtcccgtcccagagggggcgaactcgcccggccgtgccaccccctccgggctggcatcctggcggggcgggcgcggcgccttgagatggggaagcccggggccggccgccgccagggggcagcagagaccacctttcccgcgcgtcgcccgccggacaacccggcaggtgcggggcccagcgccggggaccccagctgggcaaggcctgggggtcctacttaccctacaaagcagtgcgctgccgtgagcacccaggaggccgctaccaggacgccgccgcacagaggctgcccgccgagctgcagcctcaccagccagggccaggccccgggcggcgccgcgctgccccccacgatgcggccgtgggcccgcgtcacattggcagtgctcggacgcctctcgccgcacggccctagaaaggggcaaggggtgtcacgagggacatgttctggccatcctcgccttcgaggcccacccgg

SEQ ID NO: 10844 - DNA, 919 bp, Homo sapiens
  source 1..919: mol_type = unassigned DNA
cggtggggtgtgaacgggcggaagccccgtccagtgcctgtttaaccacctccagcttgtggaggccgagcgaatgcgggtgtggggtccgggccggggtacactcacgcgttgcgctggcaccgggactggatgcagatgagcaggcgcaggtggtcccgggggcgcggcggccccctcctcggcggctccccgagcgctgcgggggagggtgggacgtggtcaagcgggcgggcggcggggtgggcgacagagcgggcgatcctcccacgccccgggcctcacccacgtgcagcgtggcggcgagagcgtagaagccagccacgggcgccctgtactggccgctggtcaagttcaggcccgggccgcggcggaaggcaccctcggcgtcgggctgcgaggggcacggatggtcaccccggctcccgcccggccggactcacccgccctcccgcgcgccggcactcaccaggtagtagacgccaagctcgtgcagcgcgcgccgctccaccaacgcgtcccggcgcaggcggcagaggaaagcggcctccacgcgcggcgcccgcggccccggggccaggggcgcggccagcagtgccagcacgtcccccaccacgtcgtcgtcgtcctccccggcggtggccgagaccggggcgaggctcgcagcgaccggcccggcggggccacacgtacagggttcgggctccgcgcgctcccgctgccgcaccgcacctggcacagagcgagcggtggccgcgcgccagggacccctcacccgcccgccgcgtgggtccagccctgaacgacaggtgctagcgagaccaggggcctgccgggcgcaggggtggggcgagggcgacgtcccctcggcctgaagggcctcggagtctttgcgtcctgaccctgcagcggctcccgt

SEQ ID NO: 10845 - DNA, 2488 bp, Homo sapiens
  source 1..2488: mol_type = unassigned DNA
cgggccgagtccgaggttgctcggaggtccagggctcccaccccgcgatgccagtcctgcctcctcctgcgccccgggcaagggtctgtccgcctgggggaccgcatctggaatccgcgtggctcccctccccggcggtgccgtctccacggacagtgcgtgcccgggtctgggctggagcgacgtccccgagattatcctattactttacaactgtggctcgcgcgccgtcaggacccggcccggtgtgggctggcggagcacaatgaccggcggcggggcgggggcgggcacgcgggcggcgggcgctgggggtcgcgtagatgtttgggtcgaacaggtgagcgcctcccggacactcgggtgcccgcggggggcggggaggagggcggagggggtgtaaactaagtggtgggaaagagacaaaggaagagtgaagagcgagacggtgcggatggggaagggggaggggcgcggaggggcagccggtgggcagcgcgccgaggagctcgagcttgaacttgatcaagcactgggggccctgccgtgggggtggggcgggggtacggccgagagccggccacgtgcctggctttcccagcccggggtctcgctccggccgcccgggggagccgaaccccgaggcccggcagccccgccccacaagtacccgcgtccctggggacccgaaagacgcatgggggtcgaaggctgcccgaaggggccccgggcgccgagagttcctgagggtgcctgagtcactttatttgggccaagtctccctctcctggcctgaccgcagacagcccgccgggtgccctctccccccagcccccaccggacccagagaccgcagcctccgggagcgatgggtaggcacagatcccagcgccttctttccgggctcagccccgtgcaaggatcttcctcgaagcgcttcccccttaagagcgcgctccccaccgaagcgcacggcggcgcgtccagcgcgcccttatccccccctacctggcccagctccccctccttcctcctcttctccccccgcgcctctctccctcctttctcctctcccctctccctgggtgcctccttttcctctctccccttccccccgtgcccactcctccctctcacccgcccctccgccacctcctcctgctgctcctcctactccccctgcctgcgccctccctgcgctcccctcccccccgcccccgccccgtgcccggtcccgccccctctcccgcctccccgtgcccggtgccccctcccccttcctccgggccgcggcgccgccgccgctgccgccgctgctcgcctgggccctcctcctggccacccccgcccccgggccgggcagtgacgcgccgcggtggtgccagcccctctccccgggcagccgcggcggcagcagcagcagcagcagctggagctgtggggctgtcaccgccgcccgccccgctcactcgcggatcccgaccgcccatctccgcctcgcttccagcccaggtacggagtccggcccggatcccggcgatcgggccgtttccggggcccgggccgccgccccccttctccggctgctgccgccggccgttgagctgcggttaggggggcgaggggctgggggcggttctggggaggggggcgcagggggagcttcctttgccggggctgagggagggggcgcgggggagcggctgcgccctgggccgagtgggctggggcggggggcgggtgagtgtgcccgagagtggagggggggcgatgaaggctgcactgtgggggccgcggggcgcccaagaggtgtgtctggccctgagcgcccagggtcgcggggcgcaccccactcccggggtgcgcgccgcgggtcctggggggcggtgattgtgcgcgcagcgccgcggtattgtgccacggccgctcggtgtgcagcgggctcggcaccgcgtcccggcgagggaggcgttctctggcggcggggcgggggccgggctcgggttgccgcggccgccacgagaagggaagtggactgtgtttggggatgtgaggacgggaagcgttgagtgtcagggaggggttccccggcgcggcgcggggagttgagacgcggtttgcagagttgagcccacttcagcaggcccgggtccctcccgggaggggacggggtgtccctctcaggtgcaccgtctgaccggaagccgcgggcgttggcggcccctggcgaaggggccttccttaatgaggggacacggcggggcgggggcagccggccgcctcgagggcgcgcgcaggggttaagttggatttacacctccgccctctctctcctccctccaccttgtcttcaaggctggacactttggatagggaggaggggggagtgcaatccgcatttttattccagccgctcgggagcagaagtgaccctgctcccacccggagctgcgtttgcccgagtccggccgcccctaccgggctgcgc

SEQ ID NO: 10846 - DNA, 513 bp, Homo sapiens
  source 1..513: mol_type = unassigned DNA
cggccgggcttgtcacggggctctgtgcagccttttccactctcccggctgccagcgtcccgccccgtcccctcccagcccccaagggaggaggggagagctgcagagaggaggaggggtcggggaggccggctttataaaggcggctggaacaaccctgcccgccagaccccgtcgcccggatcccctgagctgcccgccatcccacgtgaccgcgccgccccccagctccaccgctgagtgagttggggcgcgtccctatcccgttcccagtccctcgccgagccgcgtggtgcactgaagccggcgtggggaggagagccgatgaaggagaacgctaacatgggggctccaggcagaatctctaatgggagagatttaggacctgagggagccgggagacccgggagcccacggtctggtcggccacctcctctcctccccgggcgcgaggcctatgagaccgcaagccaccctccaagaatgcgcgtgcagtcgttgccgtggcaacgt

SEQ ID NO: 10847 - DNA, 1766 bp, Homo sapiens
  source 1..1766: mol_type = unassigned DNA
cgctctttgcccacccgcgtcaggccggtccccctccggcctcttctgtggcgcgagggacagcggaaaccacggtagacagcacccccttgagtccaattcctcccctttcggaggaagccggtttctcctttctatgctactcccgggccatttctggacaacagctgctattttcacttgagccgaagttaatttctcggggagttctcgggcgcgcacaggcagctcggtttgccctgcgattgagctgcgggtcgcggccggcgccggcctctccaatggcaaatgtgtgtggctggaggcgagcgcgaggctttcggcaaaggcagtcgagtgtttgcagaccggggcgagtcctgtgaaagcagataaaagaaaacatttattaacgtgtcattacgaggggagcgcccggccggggctgtcgcactccccgcggaacatttggctccctccagctccgagagaggagaagaagaaagcggaaaagaggcagattcacgtcgtttccagccaagtggacctgatcgatggccctcctgaatttatcacgatatttgatttattagcgatgccccctggtttgtgtgttacgcacacacacgtgcacacaaggctctggctcgcttccctccctcgtttccagctcctgggcgaatcccacatctgtttcaactctccgccgagggcgagcaggagcgagagtgtgtcgagtgagtgtgcgtctgtgtgtcccggcgagggtgcgcgctcggcgccgggagcgcggccagccgagtccggaggcatcgggaggtcgagagccgccgggaccccagctctgcgttcactgccccgtccggagctggacttcggggccggggccggggccgtgcgccggggacaggcagggccgggtcgcgggccgcgcgtcccccaggccggaggtaaaagcgctagcgcgcggagggctcgaggagggcaccgcggctgggccccccgcgccccgggccccagccgtccgcggctcccggcccgacgctccccgccccggagcgcgcccgcctcccctgcgtggaggccggcgggcaggcgagcggggggcggtagcgccgtgccaaggggctggctggggcagcgtggccggccgggctggggcgatttaagagcggtccgggcggggtgcggagccggactttggctggggcggcgcgcggggagggggccgggggcggtggcggcggcgttggggggcggggaggaggcaggaggaggagcagcagcgctcgccgggggatgcagcagcggcagcggcggcggcggcggcggcagcggcagcggcggcgcggagtcccctgcgcccagcggcccggccgggctgcggcagaggcggcggcggcgccccgctccgggtgaggttgccggggccgtgcgcgctggtgagtggggcgtggggggcaggtgggtggctgggggacgcggggctcgggcgggggctcgcggcggccggagccttccccggcgtgagcccggccgcgagcgccgcccaggtgagccggggctggtccggaccgcccggctccagccccagcgctgcttgcggaggtgggtccgggcgggcgggagggaggctccggcgccggccgtccgcagagggatgacctgtttgaccccgctggctggcgggcgggcgaggacttcccgccgcgcccctgacccgcggacacggcacaccgagcacaggcggccccgggtaggggagcgcgcctgggccggccatccgc

SEQ ID NO: 10848 - DNA, 6511 bp, Homo sapiens
  source 1..6511: mol_type = unassigned DNA
cgtagggtgaacaggtccggtcaggagccgcagcgccgctcacctgcacctcgtccatctggtgaggcatgtcgtggagccccaggttctcggccaggcccgcggcatccagggcgtgtgcgtggggcagcagcaggtcggagcggcggtaggcatccctgcgggcgctcaccgcgcccgcctccagcccggagaggtggggcagtaggccggccgggcgcccgtggtgcgagggcagccccgctccctcctggctctggcggccgggccaggcctgctgctggctgcctgtgggcgccggctggtgcagggggttgatggcggcggcgtacgcttcccccagatgcgagtaggggtcggccgactgggagtaggccagctgctggtagggagggggaaagtagggtggcggctgatattcggcgactccagtgtgggagaggggtggcgcggggctgtagaggtgctgcccggcggaggagaggtgggggacccgcggattcccattgctgctcccgtcgtggcgatcctggagggaaaaaaaaaaacaggagaccccgttagtgcgaaaccccgctactgcgaactggccggcatcgccgggctacgcagagggccccgggggaccaaccgcaccccgcccggcggggcttgcccagggtcggaaggtacccgggggcaatgcgccccgaggatttcgttgtaagcaaagagtgcggggagggaggagagtctggtgaaagacctgggggaacgagttctcaaagcccggcggcgaaggtctaggcgctgctcccaagcccgaggcgcttggaggcgccaagtccgaaccctgggtcttgggccagaaaagtccgtggccggagcccggggcgaaggagccagagcccggggcgaaggagccggacgcccggtgcagagctatctcgtggagcccgcccatgacgcagggactgctggaggtggcagcgcggcaggcgcggatagagtgcgcggcgcgggaaatgcgcacctcccccgcccccgggaccctcccttccacgccctcgggacaaagacctccgagcgggcggcgctcggaaagcagggcccgccaccctgcgccgccctgggaagtgaagagggagcgcgcgcacagggcggccctccctgctggccgggcccagccgaggggagtaataagtgggggcgccctgcactgccaagggcagtgttctcgcacgtcggggcgcagagggggcatgaagaaccctggaaattgggcagccttgcccgcgcacgttccctcgcccctgggcggcccgactcagtttctaaaggatgcgtccccatctgcccaggggtctcggggcgccgggaacctggaggaacatggcgctgtcgcctcctggcggaagcgcccgggcctgcgggcaggggcagccctccagggcccggaggcgcagtgaactcccgcgagtccgtagcccgagctccgcgctcccggcgcccctgagctcgcctagcgctgcctgcgtcttcttcctcttcccgctcgccgcctccttcttccctcccactctccgaaactctagctcaacctgtccgacaggctggagcactcgcgagctcttacggccccatctggcctcgggcacccccaccaccactccccagcccccacttcttttgaaagccaaacttcggttgttttcgtgcttccccgaggaggtagcggggcaggtgacaagccggccttggaggagtgtccgccaaggtgtcgctagcaggtagcctcatctgacccctttggacagagacttcgtgcgtaaaagccacgtctgagggttgcagacggggcacttttccgagaaaacgggaagcagggctgtttgccgcttaggaaagcgcccggtaagctgtgtgggtgggatttgccattctctttccaggcctcgttcccgaggggaggctatttaggaaaaggccctatacaggaaaggggccccgcagaaatggactaaggggtgtccggagaagtggatcccgtcccaccgagaggccagggctcctatgccctcgtccccgacctcggtccagtggcccctgcctcccggactgtcctcggcggggcggggctgcaccccggagccccagctcacctcgcagtcctcttcgtacttgacattatcggttattttccacaacatggcgtccggcgtcccccaaaacagtcgccagttaaatccaggatccccccagcccccaagcggtaaatccaaaatcggggtcacggtgaccaggcgtctgccgccgcccccgccgcgcgcgggccttgctgtccgggtcactggacacgcatcggcggctctgcgagcgtagatgctgccgccgcgagtgtcaagaccgctccgcggacggggaaagccgcgcccgaacagtgtgtcctggcgatagccgggggacccgagcgccttaatgagaaggaaattatcataactcctccccgggggccggcgcggaggcccaggcgccgggcggggcggcccccagccagtcccagcctagctccgccccgcacccgggcctggcgcagcgccgagccccacgctgtgagggacgaagcgcggagtcagtgggcggtgcctcgttgacagccgaagacctgcgaggcctgggtcccccgacgcgccttccttctgtcacctccaccgtaaacacacctgagattggcagagctgggggaagggatccaaatactgaaacccacccctctttcgcctaaacggccttcactcgttcctccaaaagacggatgtcacctggagttaagaaactgcgcatttggggagcgactcaacaaccggggtctcctcatctcctaaaaacacatcccatcccacctacaccccactgaggcttaaggtctgagctgggatcatgcagctggagccccagtgcgccagagacgcccagttccctccgtgggcacagcgcggtcccggcccccgggcgggaggagagaggaagggactcctggggagtctgccccaagggccgcagaggcagcagacggtcctacccgcccaggagttgcggacagcggcgtctcgccgctgtcgcccgaagtggcatctcccgcggctggctgaggccagggggaacccgcgcgcactggaccagcccagcggcccggccctgccctgccctgcggaacgccggctctgcagctgcctctggcgggccggtcactcagaagcctctactcgccctgggaaagaagcgccgggcaggaataaaacccgagcgccacgggtaaggtgagggtgaggaggtgcaggaagttgggagagagcctgcagagagctctcgactggagaggtagacacccaggtcccacatgtttagacagaaaacgaaacttccttccacacaaacgctgcttccctctccccttcggtacttgccacccaaacttgaaagcaaagtgcaatactaatttttaaaatttaaactaacgaaattctttggcccagttattatgcagcaattgactttcattgtaaggggaacatcgctaattctcgagggcgtatttgttgggacgccccaactggctccctgggctggatttaaacattctgtggggattagaggacaagactatttctatttgatactgaatacgattttgcaataatcaatgcctatcagtacggtgtccgcacctgcagtagacatgactctcccatccacggaatggcggcatccactgcctcgctgttccttctcgggttcgtttgaactttagcatttatttagacccaggtgggcctaaaagaaaataataataataggcgtcctccaagggaaactttcccccggccttagacagcagccaaatcccaggtgattttccgaccggacgcgggaacaaaatctggaagttgaaaccactgagacttttcggccaagcatatctgcagggctttgcactaaggagaacagtgcataaaaagacacacaggaccctgacacttcggtcccaaaacaggcttctgggggtaaaataagttaccgcagaagcagcgctcctggtattagcggcgggggagggggacacctgccagaagcagaaattagacccaggcccgcaggcactccagagcacaggtccaggaagatgggtcctagactcgccagaggtgcggcgcctctttcgggcgcctgggactccctgacgggtgccgctgggctgtccgacattctgggccttctagccctcggttttattctctgacccggcctgaggtgcagcttgaacaagctgtcttgtctgtgctggcaagtttacctcctgcacgctggggcccggaatgggcaagaaggtgctcatcccccatcccaggccctggctctcctttcccacagcaacactagccaaagctgcccggaggaaccgatatgcctccccgcctgggagcgtctacgcaggaggcgaagggagccgatgggcactgagggctcgcgcagcaccgtgccgtgggcccaaaggacccagaggatccggaaccgcttggcaaaggccattcattcccaaggagcttccctggaccccggcgctgccctctttccaatgggtaagcgttcgaactggagcgcaacctccgcgccctctgtacggaaggcagctagaacaaatcctctgtcttctcggcacgggagacccttccccaatacgcacattctcggcttctgggccggcacccaggcacgcgcgcgcccttgtgaggaagcctcaacccttccttgacttcaacttttctgctcagcagagccgggaaccgaaggctccagcatccaagacagcctccctccaacgtccccgccccttgcccacgtgaagacgcggactgcgtggccgcgctcaagacagccggcaccggcagaaggggacccctctggaaccccggaggcctcgcagccgcctggagaagaggatggaaggttgtcgggggttcccctctaccgccccctagggagcctaaactcacttactccctggaagccctggacccacgcccctatgaaaccgcaaaccaggcctctgcaacagcgggagcgccccaacagcgcgccacttccaaagaggcgcgaggtggtgcctttggaaacagggctcccggccccaggcctgagtcatccgccacccctgcccccaccccagacggaagaaggcggccaggcgggtagagcaagattcgggcagatctgcgactcctcttcccgccccagggaggggactcccgagcagaagatggaggcccccgagcgctttcgcagactccgcgccacgcgccggacgtttgtcccgcctctcgggacaacgtgagcgccggtagggacctcagtaagtggcagacccgccaggatcaagcaaggtggaaaggccggggcctgcggcaaacccaggaggagggggcattcacgcccgccaccctcccttcgcggcactggcacccactggaccgacactggcgtcaaagggcaccctgaagtatctatgtccagtaagggcatgccctggggcaccacagacatcaagtcacagccactccaaaataattacaaaaatgattatcgtaaataacagattgctttaatagggcgcgaagcggccgccgcatacagacgcctctggtctcagtcccaccagattcagttcactgctcgcttctttgcgctccgcgtcaggccgcatgctcttcgtttagaaccttttgagccttaactcttcctctcaaacaactccttttttcaaacaggcaaagtgaggcgaggagctgaggggctcacaggttcccaagcttccgaggagggcccgggtccacgtcagtcccggcccgccaaacgagacttcgtgggcacagtctctaacctgacaaccacctgtcccatttcacagcaggcaaaagtgaatttttagtcgcccaactacctgaaagccacaaaggtgcctagggttgaaggccactttcctagcggttctactagggagcccgttagagacatgcctgactctccccctgccctgccccgggggggacccccgcccgccggaggcctcacacgcttggccgtgggatggtagactcctgtcacctctccactaacatcccggagcccatccgtacgcaccctaaccgctcggagcgcaggcccgaggactaaggcggtagcctcgtgtcccctgaggccttctccgctccgtgttctgggtcgccatacacttcccggctaagcccggcgcctttaactcagaacttggtcgcctccaggcgtggagcaggccactgttgccagacgctgcgcggacccgtcttcctgcgccagtactgggcgacaggcagcccgggcagcacccaggagccaccctgcacggccccaggcgcccgtcccacccagcgccacccctcgcccttcgcagcgagtcctcccgcagcctctcctctctgctagcccccggggtcgc

SEQ ID NO: 10849 - DNA, 6511 bp, Homo sapiens; identical to SEQ ID NO: 10848
  source 1..6511: mol_type = unassigned DNA

SEQ ID NO: 10850 - DNA, 338 bp, Homo sapiens
  source 1..338: mol_type = unassigned DNA
cggaaacctccaatccgcgaccccggcgggtgcaccgccgagccccccgggaagtgtagttccagcgcgagcgggacgctgggaaatgtagttctgcgcgttcacgtccccgatcgggccgtgtccgccgcggccctgcgaggtccgaggggtaagggagcgtgcagcgggggcgggaccacgaggcggcggggctgggggcggcctctgtgtctgcgccggggatcgcggtgaccccgctgcggaccggctcgcggtgaccccagcgcgaacgagctggctgccggctggggcgagaaaggcctgcggaccggcctgggcgcatgcgcggaaggcgg

SEQ ID NO: 10851 - DNA, 936 bp, Homo sapiens
  source 1..936: mol_type = unassigned DNA
cgcaggcgcggggtgtcttgagtccctcaatccccagagggaaggagcccaccgtgggggaccggccaaagccccactctttgtccggcccagggcaaatcggcccctcggcagctcagcccgtccagcccctcccgagaggacacaggggacccggagtccgcaggggccagcactaccctccgccccgggtcccgctccctactccccgtcgctccgagacgctccgactctcagtccggaggtgagggtctcccttcatgcacgggcgcctgatgggggtaggggtggggacgcacgagagtcccaggcttcggcccggaccgctcggggttccaacgcccccttcccgggcccaggaacagcgcccccgcaggaagcatctgcctcggagggggccctcgggatgcaccccgccgtgtccgcgtccgatgcccgctcctccagggccccgcgacccctggggatcccccgctccccggcctagggggcacccactccgcacgtggagcccgggcagcgtccccagacgcacccagcgggataccggagaggacgccgacgcagtgcaacgccccggccgaagcgccgaacaacatgcgcgcgtcgcggaggaggtgcggggcgtgctcgctcaggcagcgggtcgccccgacgtggtagaagcccaggaagccgcagcccgcgaaggacaagctccagccgcgctctgcgtcgtacatggcggcggcggcggggcgggggcgcgggttaggatctgggtcgggatcgggaatcggctcgggtcctgatccgcagcagctccgcccggcgcccgcaagcgctctctaccctgcctcagtgtctcggccagggcattcccagcgcgacgtcagccccgcccccctcggaccatgcaaatgagccggcgggaggcccaatgagcgggcaggacgc

SEQ ID NO: 10852 - DNA, 2184 bp, Homo sapiens
  source 1..2184: mol_type = unassigned DNA
cgccacgacggggacctcaccacgttgtccctcatccacgtcacccgcccaacccacgcggagggtcctgagggcttcaccacgcagccctgaaggggcagagctggggtcacacaggtatcggaagcccacgctgtggccccaggagaaggttctggatgtggctcctatgagtgaagggtggactcacagcgctgccggaataaagggaaaccacaggcaggagggaagcgcgtccaggatccgcggccaccggcctctcagactgtcttctggggccaggtcgcgaggagatggaaagcgggggcatcacaggctcgtctgaacccgcgcgttcattcggccacaccgaccccaaacccctgcatgcgggcaggacccctggttctcctgcgcccaccccagccctgctggccgccggggcatttgagggatggttgcggggggtcggagggtggaaggggcgtcgggcagcctcggtggggaggggaagaggcttcccgtgcactatggactcccgcattcgggaagggaggcgctcggggttggggagggaggaaaaggcggctgtgttcggggagggggcagcgagaccccgcccgggctacgggttgcaggatggagcggacgggaggaaggagccctgacgccgcggaccccacgcctgccggccgtcccctccctccctgccttccttccttcctccctctccgcagaggcagcgcggggacccggccggggtggggctagggcggtgcgccccggagcctccaacctggaccccaccccggaggcgccgcgaccgcgctcccgccgcctccaggaaggtgcccggatcgcgccggcgaccggaggactctgcgccccgccgcctcccaccctgtcccgccccgcgcctgtcggcgaccccgcggggccggtccccgtctccacctgcagtccggggcgcggcgcccttgagggaagcggggctctgggatcccccggcctgggcgtgggacaccccacggtccgcacgaaccttggtggcccgggcccctgctcccccagaacagcgcccaggtctcggagaaaccccccgaagccgtgggcccagacgctcccgggggacctcggtgggacgggcagggcgggcgccgcgggcgaggggacgcgcactgtccccgggcgaaccagaaacaccccacaccgggcacctccccaggaatcgcccacccacccccattgttctccaccaggtttcaccttaccaccctccccccaggcatctcccccgttgcatcgcccccacgcgggcatcgctcccacccgggcatctcggctctgtcctgccctggggtggccgcagcccgcggggaggaagcgcggcgaggcgcccacaccgggaaagtgtctccgtgactctgcgaggttacactccgggtgcgtcgctgcgggctcgtgggctcgtgggctgcagccccccgctcctgtcgggtggacgagccccgggcccgcgtggagctgctcggtcaaggccggcccgggaggggcgcggcgcagggcgggcaggggcggggtcctaggtcaacgtccagccccagacccagccccgccgccggatccaccgtgcctctgtttccccattcctgagaaatcggaacgccggcggcacccccttctccgggccggagcctgcgccctccggattgcgcgcctctgtccaggcggcggccgggggtgggagcgcgcagcgggccaacttccctaaagggaactgtcgggagggcgcccagaagggaaagaccaggaagcgctgggtgctgagctggagtctggccccttcctgggggaccggggagggggctgaaggtggggagaagaccgccggggctgctaggggggcactgagggagcgtccagggggagaactctgggtgggcgacgccgcaggggagctgcctggcaggggcgagggcctcggggaagtggagcttctggccgagagctgcatctgtggccggggagggaaagggtcacaagggcagtgcgcgccgggagggaagctcaggccggggggaagggactgcgcggcggggacaggtgcgtcgggtgctggacagtgagcaggagcccgccggtgctcaggtcacgaaggtgctggagccgggggagctggaacgcaagggggttaagggaacgcgc

SEQ ID NO: 10853 - DNA, 413 bp, Homo sapiens
  source 1..413: mol_type = unassigned DNA
cggcctgacggcggggccgagcaggggaagtggaaggatggagggagaaagggagagagttccagccgccccggctgtggcaggaggagccccaagagcgctccccgagcccgccccgcacctccaggctcagcccggcgcaggctccctctcccgccccctccacccccgccagctgctgaaacccccccaccgtccctccgcgggcaacagtgcccgccaggcgccgccgcgcggtgcctcgccccccacgtcgcccgcccggaaagagcccgcagtggcccggggcgccgcgccctgaccgacgtctctggggtctgggagggcggcgctgagagctgggagaggcgctgagcctcccggtctccacgggacgccgggaaaggagagcgagcgcaactcccacgccccgg

SEQ ID NO: 10854 - DNA, 403 bp, Homo sapiens
  source 1..403: mol_type = unassigned DNA
cggctcgcgccgccgtgtcctctacccggctacacagcgactccaaaagtttagctttcaccccgcggagatttcgacagctctgggaggctctttttaaaagggaatttggagaaatctgttgctgagcacgattgagtcccactctataaaatacccatcaccccgccgtcattcctcaagtttacgctttcaaatatgcgaaccccaaggtccagcccgggagtaagccaatcccaggacccggtccaccggcgcgtgtcttgaaaagaatgtcggaggtcagattctctcctaccgcttagaggcctcggctcagcgcacacatttggggttcgcagggcttccgcgcgccggaacccgacctgcgctggattttcttccgggcgcaggagctaagcga

SEQ ID NO: 10855 - DNA, 675 bp, Homo sapiens
  source 1..675: mol_type = unassigned DNA
cgtctcatcgcactccagtggagtgtcgcgaagttgcaactcggccccaaggcggcccgcacttccacccgcacacaaaggcaggtcgcagccccgcacgcggggacagggccagcaaggggcggggaccctcggggccgccgcctccgcagccccgcgtgtgggaccctggggcgggccgccatcttgtggtgcggccgccgcctgccaggagacacctagcaactccgcagcggccatcttttacaagaaaccttcgctgcaaccgctgcgtcacatcaccgcgtctcccagggacaggaaagcctctccgtgtttggtgaagcttcaggggaagcagtcatcctgtcgtcgcatacggcaaaatcctccattgccgtagccgttcggctgacgtgacaagggaggtgcaggccaacacggcgactccgcgccctctggcggcagtgccggagcagcggcgctgtctttgacctatccggcattcggcttccgggaccgcttggcggctgtgaatgcagagctggggcgacgtggggctcgcttcctgggactgggtgtgagcttgcgcagtgagccatatgggggtcatggcctggcgtgggggcgtggccgggtggggccgctggatttggtgctggaaagctagggaagtagtcgtgcgtttaagaacgg

SEQ ID NO: 10856 - DNA, 580 bp, Homo sapiens
  source 1..580: mol_type = unassigned DNA
cgaagagttcggccaacaaagcaaacgtcccgtctccggtctcctcttcctttgtaggggaaacgaactgaacgtctgaaacgaaggtggcgcggcctggacaaacctgacccttcgacatcccccgcccctgcgcccgccctcgctaagcggggaggagcgaccgctacaatggatcctcccgcaggctttgtgcgcgctgggaatccagctgtcgccgccccgcagagccccctgtccccggagggcgctcatttccgggccgcccaccacccgcgtagcaccggcagccgctgtcccggcagtctccagccgtcccgcccgcttgtggccaactggctccagtcactccccgaaatgccagtcgacttcactgggtactggaagatgttggtcaacgagaatttcgaggagtacctgcgcgccctcggtaagcgctgcccgctgcgccctgggcgccccgccgagcagctccgggccgctccctagagccctcccgagacgctgcctgcctgcctccatcccggcgagccgcggtccggtgcccccggacgccagaaagggcgtcctcggccaccgc

SEQ ID NO: 10857 - DNA, 858 bp, Homo sapiens
  source 1..858: mol_type = unassigned DNA
cgggaacaccgccctcccgccagactcccggcggctcctcctccctctcccaaacccactcccaaagctaagtgcaggcttccccgttccagccagaagcgctgcgtgagcctccacacgtagccgcaggcagctccttaaatagcgtccgcgctgagcaaacagtccagacgtggggcccaggagggcgagctgaggcgaccgcaccgggcgcgcagcggcggcgggtcagccggcggccaatagccagggcgcggcccgccccgtcgcctcccctcggggagcctataaggcctccgcagcgccccgggcgcctgctgctccgtgcctccaccgacgacctcactcagctgcgttacgcgccgctccggctgccggccgcgcgccttgcccgccggctcccgcccgcaatcggcggctcagggcggacccgggtctctgcgttctcgcgagaagcgcggcgctgcggggccgtgggcgcctgagcccgcgcggccctcgagggccgaatatggggggatgcacggtgaagcctcagctgctgctcctggcgctcgtcctccacccctggaatccctgtctgggtgcggactcggagaagccctcgagcatccccacaggtgagcaccccgcggtccgccgctgtcccgcgaggctcggccggcgggggggcagttcattcatccaccagcccttccgcggggctggccaggtgagtagtgggggcctgtccctcctctccaggaccgccggggtcttccccagaattgcggtcgggcggcgctggtccctggggaagtgtaggggcacccgccctcgttgactccttggagttctcggtgaactcagcgtgcccga

SEQ ID NO: 10858 - DNA, 5715 bp, Homo sapiens
  source 1..5715: mol_type = unassigned DNA
cgcccgcaccgcgcacacaggtagtggacgcccgcccacctgcccgtctgctgggcgcagggcgctcctggggtggggagggcgctcctgtggggggaaaaggggcgctcctgcctcggagggggaaaggacgcccctgtggaaggaagggggggctcttgaagcggtgtggtgagaggacgcttccgaggaaggaagggggtgctcctgcagcggtggggggagaggacgcccctgcggaaggaaggcggcgctcctgcgggggctggagagacgcccgcgcggtctcccggctcagggaccgctggctcgcgggtccgccctctccccggcgctatggaaaccgcactttctccgcctgccgtccccgatctctttctcctattacctcccaaacgcgatttcaacttcccgacaagctgacaagtgaatggcgcagaggacgccccgtaaagcgcccgcgagcgggtgggacacaggcgccccctccgcgcccctctgtcctccacggaagggcgcgcgccgctctcgatctggagcgcggtgctcgcgaacccgcggccgcgggccctggaacctccccgcgtttcgcggctgcggggggacggagatgcggccgggagacggggacgggaaacgggggacggggatggggcgcgcccaccccgagcgcgggagcggccgccctcgcccaaaatggggaccccgcgccccgagagcacggcccggctcgccgcccatgcttccactgcaaggccgcagcccccgccgccgatcccgatcccccgccccgcccagccgcggccccgcccggcgccccctccccggcggaagctcaagcccaattaattgagtccgaggcgggagggaagggccctgcgcgccgtggcccgccccgcccctcttccgcgccccttttcccgccctgggtggcatctcctccgccggcatccacaacaagccgctgattaatgaggccggggccgccccaccccgcccggccgggccggggccttcgcgggagggggaggggacggcgggaaacgcggcccggggagaaaggggggcggggcgggggcgcgcggcccgcccccgcgagcgccgcgccgattggccgagcgcgccgtccgtcggggggcgcggcgccaatgcgaggcagcggggcggggcggccgcgctgtgtgtgcctgcgtaacgccgagtcacatgttgttttgctcttcttagttcagtcactcggtgcgcgatgtgttactcactgtgcggcggggaccgcgacgagcccgggtcgccgttggcagcagcagcagcaacaccagcagcagcagcagccccggcggcggcgcggaccccgagcgcccgggcgcaccccggcttcccggagcgcgacgcggcggcagcagccccggtgcggccgcgcgcgccttaggctcggccccgcggctcggggaccccgactcccggcccagcgagcgcgtcccccggcgccgcccgagagcccgaggaggcagcggccgcaggcagccggggaggggggcggccaccgcccgcgccgggcatcctcaggagccccagagcgcggagggcgcggcgccgccgagcggtgctggcccccgcgggcctccccggaccttccccaccgcctgggcccgagggacgcgtgatcgggcgggcggccgggcgcaagggtgggagggagccgcccccgcccgcgccccctccgcccctcgccccaacccctgggcgccgggcccgggccgcgcggcctgaagcgcccgcgatggcgagcccgccgcggcacgggccgcccgggccggcgagcggagacggccccaacctcaacaacaacaacaacaacaacaaccacagcgtgcgcaagtgcggctacctgcgcaagcagaagcatggccacaagcgcttcttcgtgctgcgcggacccggcgcgggcggcgacgaggcgacggcgggcggggggtcggcgccgcaaccgccgcggctcgagtactacgagagcgagaaaaagtggcggagcaaggcaggcgcgccgaaacgggtgatcgctctcgactgctgcctgaacatcaacaagcgcgccgacgccaagcacaagtacctgatcgccctctacaccaaggacgagtacttcgccgtggccgccgagaacgagcaggagcaggagggctggtaccgcgcgctcaccgacctggtcagcgagggccgcgcggccgccggagacgcgccccccgccgccgcgcccgccgcgtcctgcagcgcctccctgcccggcgccctgggcggctctgccggcgccgccggggccgaggacagctacgggctggtggctcccgccacggccgcctaccgtgaggtgtggcaggtgaacctgaagcccaagggtctgggccagagcaagaacctgacgggggtgtaccgtctgtgcctgtctgcgcgcaccatcggcttcgtgaagctcaactgcgagcagccgtcggtgacgctgcagctcatgaacatccgccgctgcggccactcggacagcttcttcttcatcgaggtgggccgctcggccgtcacaggccccggcgagctgtggatgcaggcggacgactcggtggtggcgcagaacatccacgagaccatcctggaggccatgaaggcgctcaaggagctcttcgagttccggccgcgcagtaagagccaatcgtcggggtcgtcggccacgcaccccatcagcgtccccggcgcgcgccgccaccaccacctggtcaacctgccccccagccagacgggcctggtgcgccgctcgcgcaccgacagcctggccgccaccccgccggcggccaagtgcagctcgtgccgggtgcgcaccgccagcgagggcgacggcggcgcggcggcgggagcggcggccgcgggcgccaggccggtgtcggtggctgggagccccctgagccccgggccggtgcgcgcgcccctgagccgctcgcacaccctgagcggcggctgcggcggccgcgggagcaaggtggcgctgctgccggcagggggcgcgctgcaacacagccgctccatgtccatgcccgtggcgcactcgccgcccgccgccaccagccccggctccctgtcgtccagcagcggccacggctcgggctcctacccgccgccgcccggcccgcacccgcctctgccgcatccgctgcaccacggccccggccagcggccctccagcggcagcgcctccgcctcgggctcccccagcgaccccggcttcatgtccctggacgagtacggctccagcccaggcgacctgcgcgccttctgcagccaccgaagcaacacgcccgagtccatcgcggagacgcccccggcccgagacggcggcggcggcggtgagttctacgggtacatgaccatggacaggcccctgagccactgtggccgctcctaccgccgggtctcgggggacgcggcccaggacctggaccgagggctgcgcaagaggacctactccctgaccacgccagcccggcagcggccggtgccccagccctcctctgcctcgctggatgaatacaccctgatgcgggccaccttctcgggcagcgcgggccgcctctgcccgtcctgccccgcgtcctctcccaaggtggcctaccacccctacccagaggactacggagacatcgagatcggctcccacaggagctccagcagcaacctgggggcagacgacggctacatgcccatgacgcccggcgcggccctcgcgggcagtgggagcggcagctgcaggagcgacgactacatgcccatgagccccgccagcgtgtccgcccccaagcagatcttgcagcccagggccgccgccgccgccgccgccgccgtgccttctgcggggcctgcggggccagcacccacctctgcggcgggcaggacattcccggcgagcgggggcggctacaaggccagctcgcccgccgagagctcccccgaggacagtgggtacatgcgcatgtggtgcggttccaagctgtccatggagcatgcagatggcaagctgctgcccaacggggactacctcaacgtgtcccccagcgacgcggtcaccacgggcaccccgcccgacttcttctccgcagccctgcaccccggcggggagccgctcaggggcgttcccggctgctgctacagctccttgccccgctcctacaaggccccctacacctgtggcggggacagcgaccagtacgtgctcatgagctcccccgtggggcgcatcctggaggaggagcgtctggagcctcaggccacgccagggcccagccaggcggccagcgccttcggggccggccccacgcagccccctcaccctgtagtgccttcgcccgtgcggcctagcggcggccgcccggagggcttcttgggccagcgcggccgggcggtgaggcccacgcgcctgtccctggaggggctgcccagcctgcccagcatgcacgagtacccactgccaccggagcccaagagccccggcgagtacatcaacatcgactttggcgagcccggggcccgcctgtcgccgcccgcgcctcccctgctggcgtcggcggcctcgtcctcctcgctcttgtccgccagcagcccggcctcgtcgctgggctcaggcaccccgggcaccagcagcgacagccggcagcggtctccgctctccgactacatgaacctcgacttcagctcccccaagtctcctaagccgggcgccccgagcggccaccccgtgggctccttggacggcctcctgtcccccgaggcctcctccccgtatccgccgttgcccccgcgtccgtccgcgtccccgtcgtcgtctctgcagccgccgccaccgccgccggccccgggggagctgtaccgcctgccccccgcctcggccgttgccaccgcccagggcccgggcgccgcctcatcgttgtcctcggacaccggggacaatggtgactacaccgagatggcttttggtgtggccgccaccccgccgcaacctatcgcggcccccccgaagccagaagctgcccgcgtggccagcccgacgtcgggcgtgaagaggctgagcctcatggagcaggtgtcgggagtcgaggccttcctgcaggccagccagcccccggacccccaccgcggcgccaaggtcatccgcgcagacccgcaggggggccgccgccgccacagttccgagaccttctcctccaccacgacggtcacccccgtgtccccgtccttcgcccacaaccccaagcgccacaactcggcctccgtggaaaatgtctctctcaggaaaagcagcgagggcggcgtgggtgtcggccctggagggggcgacgagccgcccacctccccacgacagttgcagccggcgccccctttggcaccgcagggccggccgtggaccccgggtcagcccgggggcttggtcggttgtcctgggagcggtggatcgcccatgcgcagagagacctctgccggcttccagaatggtctcaactacatcgccatcgacgtgagggaggagcccgggctgccaccccagccgcagccgccgccgccgccgcttcctcagccgggagacaagagctcctggggccggacccgaagcctcgggggtctcatcagcgctgtgggcgtcggcagcaccggcggcgggtgcggggggccgggtcccgg

SEQ ID NO: 10859 - DNA, 858 bp, Homo sapiens; identical to SEQ ID NO: 10857
  source 1..858: mol_type = unassigned DNA

SEQ ID NO: 10860 - DNA, 247 bp, Homo sapiens
  source 1..247: mol_type = unassigned DNA
cgggcactgcctgtcgtcagcataacgaagaaacctacacccacgaagacttcagaccccacgtgattacatcactcaaccaccagcgctggcctggaggaacccgctgtcacgtgaccgctcgtgcccaatgaccgaggcccacgctttccagaccgccacagtcgctgtcacagggcctgagtttgggcggcgccccgccccggccgcacggtgcgccggcgttaatcctccccgaaggttccgg

SEQ ID NO: 10861 - DNA, 224 bp, Homo sapiens
  source 1..224: mol_type = unassigned DNA
cgccgccaagaaggaggaggagcggcaggaggcgctgcgccaggcggaggaggagcgcaaggccaagtacgccaagatggaggcggagcgcgaggccgtgcgccagggcatccgagacaaggtgcgcgccgggccggccccgcctgcgggaaggcggccctgagtccagcggggacccagatcccgcctgggtggaaggggctgcccggaagaggggcgggcgt

SEQ ID NO: 10862 - DNA, 1174 bp, Homo sapiens
  source 1..1174: mol_type = unassigned DNA
cgatgtggcggggcctgggaaatgcgcccgctggagcacaccgcagcctcgcgggctcccgagcggcgcgcgcgggccgaggacctccagggcccctcgcgggtctcccgagcgccgccgcaccgcccctgcccgcgcccgggaccgcctcgtgggcttctttgttagggccgcctgcgccgagaggcagtctaggtcctgccggggacgcacgggccccactcctgacttcctagccggagtcccctgaggacttgtaagcatataggctggagtcgagaggctaaattaggccccaggggactttttcaataaaaccctaaatttcatttaggttgttcgtaggccaagcgattgcaaggactctgagccgaagcagcggtgccgggccgacccgaggctcgctccttatcgccccctccccgggccggctttgtgcagctggggtcctggaacccggtccctcccgggctgtcggccctggggtctggtgtccgccaccctccccccccggaggtcgccactgcccccctaccccactcccagcccttccgtttccctccacgtccccttcccgcgccctcccccacttgaattcttcctcccctccggctggaagaaaagtcggtaatgagaaaccagttcagtgtcagtcggaggaggggggcagataaccccagagatacacggcaatggagagagaactcattttgtgcaaagagggcctcgagtcaccagggaattcctggattgtctcaggctgtcgtgtgtgatgtccatcacgccgtgcgaacaccatctgctcggtattgtgctctcagttgccaggctacctgctgtacgcagtaacacttgactgcctggctccacgttcgcagcgctcgcccagacgcgcggggcgggggccgcggaggggcgggcgggagccctgattaagccatctgcgaggggagggggcgcgggcgcagcggcggccgggcacgaggccgggctgacaccaccatctgctggggcgcgggaagaacggcagctgctctgcgttgccccggcgagggacgcctggaaaaggctgaagccctgggcgtcctcaagcccgttatccacggggtccccgtcaccccagcctgctcgccgccggccgtcttttgtgattccctgctctttggttcgccgc

SEQ ID NO: 10863 - DNA, 8657 bp, Homo sapiens
  source 1..8657: mol_type = unassigned DNA
cgagacgcgccgacctctccgggaagcgcgagcgcgcgcgtgtctgcgtctctgtgcggatctgggcctgccgtgcgcgtgtgtgcaaaggtgaaacggcggcggagtttcaaacatttcatcttcgaaccatctcctgttgaggaactaaggctgccaggtcgttgctgattttgaagagggtctctttcaactgcgatccctttaaggaactcggctctgtccatttccaaggaatgtcccttttcctcactctccagacgctgcaggctccccgcgctgcgctccctcccaggctggagccgcagctggcgggacgcgccgtttccacggtatgccgggtgagagccgcccacgagcggcccagcgtggcggacctcggtcttgagccgcgcggacgcctggccacgaggggctcccgacccgggcggggagaggtgcgacctggggggagggggcggggcgcgtaggaaggaggaggagagagaaaagggcgaagccagcgcgagattaggaaggagaggagggtagagacggagtcggcgagatgctggagaattcaggattgtgggcaccctgagcgggagagaaacttcaggaagcacgtcggaggcggggcatctgtgggaggaaggcaaattttgcagagcgctaaaggatgccgggagggacaagttagccatggggagacctcccagaaatccggagctgaaaacagggcagttaagtaagcaagagctggttagctgaatacgaggtccctagaatgtaaattataaataagaaagaaagaaacgaaagaaaaagaaaagagcgcgcgcagggtcccgggtccaggcgctcagagcagcccgtgcgggggccctcccggcccacagtagccgccgccccgcgtccctgaagtggcgcccgcgtggctactcggggatctcccaggcctcgggggcccatttgaaaacctcgagaggccttgcacatcctgccaggactggagctgcggggacctttcagtcttccacggatgctcctctgcacgtgttttccaggaaaacatttaggcctcggaagcgtctttgagagcctagaaatgccggttgagcgtgaaatccagtccaacctactcacagagtactagacctagaaacgacgtttgaaagagatgtgggttccatgttgacttaaattttgttccatttataacaacgcttttgttttcaaagaaaagaaaaatttcttagccaaacttctcatgtccccggccccctgttcctgcctcgctctctccctcgacaaacgcggggagccctggaacgggagggccggtgaccgcgaatacggtagcgatgtgatttgatgcactgaaactacttacatttccaatgttacttcattaaaggaaacccacataaaagcgtctgtttcatcttaattgccaaaaaagtttgccacacccccgaacggtaactgtttccccgccagacaccgaaagctcataaggaaccacaatgagaaaggatcaggagtcgcttaggttttattgaaatgcctcgatgccgttttttcttcttccccgaattaagccgccgggggaggaggtgggtcgcgcccaccgttgccgggactcgggccggcagacacgggccacagcgccccctcgccgcccgcgcgcacgactcctggcctgcgtcgcctccttccgtccccgcgacacggaggacggcgccgcgcccggcgagcgccccggccttctcagtcggccgcgtccccggggagaccccgagcccgagcctccggggccggctgttcctcgcgctcggcctcgcaggaaatccccgctcgctgaaacttgcgtgtccacgtagactcgttctaaattctttggctgttgcagggacaataaagaaaaatagaaacagtgttaattttttccccacctcctagggcacacctaggaaagggggcagggcccaccaggaacctgaaactgcccccatcgcctgggttattgtgaccaggggtcgcgtttgcaaagcagttactgggttttccctgcgtgcctgctcattccctccctcctgctcggacggcaactgaaaagcctcagaagccaagtgccgggctctccccagcgaccccacaggcctgagcaccccgcctcgcccttgagcaaaacatcccaggccctcctcttcgggagccgcggccttgcagccctcgtggccccgagacggagtctgggctgagcccgccaccctctcaggcagcctcgccgggaccgccgcgccaagactccacgctggcagcatgttttctcatgattgattttttttttttttaagaagaagaccaagccaactttaacttaagaagaaggaatgtgatttttttctttaatatcagagagctttaaagcaaaacgtagtttatatatttcaataacaatgacgagtgttaagtttttaatgtccctgcgtaggcattttaatttgctacagtcactaccaataaaaacggcatgtagtaagagtcgactgtttaatagtgcaaggtagacggtttttattagtaacaggcagcagcggtatggaacatatagatttcagtggaggagtataattgctaaggggaaaatacacacaggacgggaagaggccatcttcaaactcccaacactgagctaaagagggggaagggcaggcggcgtttctggagatgcaccctgggtgaggggaccctccccgccactgcacgtgtctggttatatatttaattgatgtcagaatcgactgtatccagagcagacactccagctccaaactgaggatgtttgtataataactggctgttttctcttctgcccctggcagaggtccggcggggggaggggggtgggtcaagggagggggagggaggatgagccccaaatgctaatgaaaccacagcgggaaccgctctttagaaatggaaatactccaggccagtgctccctggtgataaaaattacacccgatttttttttcatttaaactgatctgatcgtaaaggaaccctaaaggttgccatctgatctgacagtgtttgtgtttgccatccagcgtgtgggcctctcatttacccctcttcttggaggaattccctcccaggaagcgcaaaaatgtcgcagactgtcgacggcttgcccaacccggctgctttctctctctctctgtttttcagctctatagtaattgattaaaaatatctgtcctggactgaattaggatgtcccatgtggagtcgcaacaaggttgaaaccccccgctgggtcgttgcagggggcccagcctgtgggaacggggtgtctgtgggtggagggagaggtggtcgtgggtgtgtgtgcgtgtgcgtgtgttgagatggcctgaagaggatgtgtgcaggatgggggtgtggtttgtaggaagagtggtgggggagcagtgtgggcgaaggggtgggtgggataactggtagggggcgagtggctcggctcgggagctcctggcgggaggggtaacgtgcctggaccgcgcctaccgggagcctgccggctcaggaggagccatcctcaagcacagcactgcagtttgcaactggttcccttgcacctggggaaagacagcctgatgccgtgagtgtttctcttgcgccctggaccagactggcaacccgggctccgctccctccgcgccgctgcagccgcaccacagggaggccgcaacatgccctgcgtcctgagatcactaaggctgctccgcaggctgcagggccagcaggggtgcaggagtcggctgcaggcctgagctgaggcccgccccaggccactgcgctctctcttctccaccgcacccacccgagacggcttccgaggatagaggcacctgctgggtgggtgctcccaataggccagcacagacctgacactcttccatccccctgagcgccccccataggtgacccttcggagtgggcagccagacgccctcttcggccatccccgagtggaaaagggttggagaagcgtgatggggagagggttctaggaagctggggtcctaggaaccctcgccaaccgcctcgcttctgagccccgcaaggcaaccgcccccctactccagccgcgcgtcacctgagctacctgtaatgcccactgcaccggcggcgccaacctgagctcctgcccgttctcgacgtgactgggaggcttcaggtcctgccagaggcggtttgtcaggtaacaatcatccccccagtgttttgacaacacaaatctgaaagaggagtcaacttagaaaaacaaaataaaataaaactctttaggggacggcgtcttcttagctgaagccctggcgtcattcccaacagtggaaagtcgtaacgttcagggccccgggggttgcgctgcggatttgggggcagaaagctcacctcagggccctcctggcaattcgcaaccaaggcgccccggatccaggtccatgctgggcggagtggaccgcgaggggtaggcgaccagacgcgaggccacgcggggagcctcgggccaggaggcagagcaggtccgggaccgtggaagtgagagccgcgcgcactgcccggaggaagacccgagccgcgggcgccaccatcctgacctccccacttccctgcgacttccggattggacacaggggccgggcctcctcggggtgcacagcggggcaggctgtgagtcccctaattggacccggcctggcctgaccgcgggcggcctctgcctagtccgtgagggtggagaagggggtgggggcggggtagtggctggaaggggcgggggccgggcaggggcgaagacggtggccggggacggtgggagccggccggagccgggcaggggacgtggctccgagtggatgggagtgggaggggtgcgcgccggggcacgcagcgcggccgggctgggctgcaggtccgcgagccgcgggctggggccggagctgctagagaggcggctgcgccacaaaagcctgccggtccctcccgccgcccgcctccgtcgcctccgccctcccccgcctccctcccgtctctctgcccctcccccggccgcggcccggaggctgcagcgggcggagcaggggaggggcgggcccccgaatatgcagatgagcgcgtgatggacagctgcgcgttccaatgtccctcggaaactcgagcgctccttcctcaactcctcactcccgactccagactcccccaaaccccgaccgccggcctggcgcgcggctgcgcccaccggctccgcgctgctgccgccgccaccgccaccccgccgccgccccggcccgcgggccgcccaggctagtacccgggccggcctgcctccgccggccgtccgggtgcccgccgccgcgccgcgccccggccgggcgtggatggagggcgccgcgcgccctgcccgctgctcggcgtgacgcgggccccgcgccccgcgcccaccatgtcctacccgcagggctacctgtaccaggcgcccggctcgctggcgctctactcgtgcccggcctacggcgcgtcggctttggcggctccgcgcagcgaggagctggcgcgctcggcgtcgggctcggcgttcagcccctacccgggctcggcggccttcacggcgcaggcggccaccggcttcgggagcccgctgcagtactcggccgacgccgccgccgccgccgccggcttcccgtcctacatggtaaccgggcgcgggcgggacgcgggactcctgggcgccgggacccagacggggctcaggcggagcggggctcgggttcggcgggcgggggccgccgggaatgtggcgcggctggcgactcaggagtcgccggctcggttggccgccccgcaggctgagccgggccccgggtggggagggcagcgcggcaggcggggacgtccctgagcccggccgggacccgcgcgccccccgcgcgtcccctcggctcgccggctgattttctctgagagcctgggaagtgcgtctccgccggggccggggtctggcgccgtttgtccctggtttccgcaccgcagcctggggaggcgttcggagcgggctgtgtgctcgcctgcattggcgtggggcgcgagggtccgcgtcactgcggcctctgagccgacggccgggcggttcgcattcactcgcggggctcagggcggtgggggtcaccgagttaggcccaggagccgagcattcagctgcggctccggagtccggcccgaggcgcccaggtttcggccttactctgtccagcggaccatgctttcaaatatcgtgcttgcgggcgcgtgacccgctaagggccgcctgagtcctccgtggcccgagcgcagctcctgctccggcgacctgggggcggctcgcgagtctcgaggttactgagctgggccaggcccgggccgcggcgaagcacgttacgggcgattgaggccattacggggttgtcgcgactgccggccctcggcggaatttctgggcagcgaccgagtcgctggggccttggcgaaggctgcaaatgcctcgaatttaaacgttaaaggatgaattaaaatgctaattacggcgtatttgaagaattcgaaacggtgactggcttctgagttgcaaattggatttgcccagctttagagcagtgaatagtgaattgggggctctggggtgtttttttaaccatataagggaggggaagagggagtagggggaggcagccgcactccaagcatctgcagaaatttagatatcaaagagctacctgtgggcctgtgtgcgcgcacgtgcaagggtttgtgtacattgccacgagcggctccggaacacttaggggaagatgggtcattttaggaaagtgaaatagttcagaaattcgagaataaaactccggtactttttgtgatcaacagctggtcccgaatcacactgcgtttttcctgctcttttgcggcgggaagcgcagccccagagccagactcacggggggaacggtggccgtgggcgggcggaggggtggcatcctctggctggttgcccgcggggtctccgcatactccactcacaggctcttgttggttccagggcgcaccctacgacgcgcacaccaccggcatgaccggcgccatcagctaccacccgtacggcagcgcggcctacccgtaccagctcaacgaccccgcgtaccgcaagaacgccacgcgggacgccacggccactctcaaggcctggctcaacgagcaccgcaagaacccctaccccaccaagggcgagaagatcatgctagccatcatcaccaagatgaccctcacccaggtctccacctggttcgccaacgcgcgccggcgcctcaagaaggagaacaagatgacctgggccccgagaaacaaaagcgaagatgaggacgaggacgagggcgacgctaccagaagcaaggacgagagtcccgacaaggcgcaggagggcacggagacctcggcagaggacgaaggtgagcgggcagcggccggcgcaaggtctcggggcgctttcttcccaggcggggcgcagagctaaggcggggaggacgttgcccgccggacaccccaggtccgggccggagccccagccgcaccacattgccctggggtcgccgggatttgagcgagcgattcctcgggcccttcccggggaggtcaggctccgcctgtcacgtggccgggtgggggcgaggtgaggggtcccgtggggagggcccagtgccgcaggacagggggcggagggggctccaggtgcctgcgctgtcccctcgtgccacccaccgtgcccgcgcccccacagggatcagcctgcacgtggactcgctcacggatcactcgtgctcggccgagtcggacggggagaagcttccgtgccgcgccggggaccccctgtgcgaatcgggctcggagtgcaaggacaagtatgacgacctggaggacgacgaggacgacgacgaggagggcgagcggggcctggcgccgcccaagcccgtgacctcgtcgccgcttaccggcttggaggcgccgctgctgagccccccgcccgaggccgcgccccgcggtggccgcaagacgccccagggcagccggacgtctccgggcgcgccgccccccgccagcaagcccaagctgtggtcgctggccgagatcgccacgtcggacctcaagcagccgagcctgggcccgggctgcgggccaccggggctgcccgcggccgccgcgccggcctcaaccggggcaccgccaggaggctcgccctaccctgcctcgccgctgctgggccgccccctctactacacgtcgcccttctacggcaactacacaaactacgggaacttgaacgcggcgctgcagggccagggtctcctgcggtacaactctgcggccgcggcccccggcgaggccctgcacaccgcgccaaaggcggccagcgacgcgggcaaggcgggcgcgcacccgctcgagtcccactaccggtccccgggcggcggctacgagcccaagaaaggtaggcggcccgcggccggcggcgcccgggaggggagggagagccagccccggggaggcggagcgcccgggagacccgagggagggtccgg

SEQ ID NO: 10864 - DNA, 1059 bp, Homo sapiens
  source 1..1059: mol_type = unassigned DNA
cggaccgtccttctccatcccaccccccgggtctccattgccgcggccctgccccaccactttcagctgaggggtagttcggagctccatggtcccttccctagagcggccgccccctcgggcctccccagagccttcgaagagccgcgtgaggaaacggggacctgcccggggcagcagatctccagcggtgaagacgtagagcaccgggttgacgctagaactgaagaaggccaaggccgtagttcccgctcgcgccgcctggccggctccgcccagcttcgccaaggccccttccggtggagccagcgctgcgaccgcctgcagaaggttgactgcgtggtagggggcccagagcaagccgaaggcaagcacgatggcgctcaccagccggcccacccgcgccccgtgccgcccggagccccagcgggcgccccgcagccgtgccagcgtcacgctgtagcagccgagcatcagcccgaaaggaagcacgaaagcggtcagagtctccaggctcaggtgggcggcggcgtggaccggcgacgggtggcacagctggcatacgcggtccctccacaggtggcggtagacggcggccgggacggcgagcaacagggcggccagccagaccgccagcagcaggcggcgggccagggccgggctgcgcagccgaggcgccaggaaggggcgggtgactgcgaggcagcgctgcaggctgagcaggccggtgagcagcacgctggcgtacatgctgagcgcgcacacgtagtacaccgccttgcagcccgcctggcccagcggccaggcctgccgggtcaggaaggccacaaagagcggcgtgagcagcagcaccgcgccgtcggccagcgccaggtgcagcacaagcgtggccgccagcggtcgcccccgtgcaggccgccagcccgccaagctccacaccacgaagccgttgccaggcagccccagcagcgccgccagcagcaggaaggctgtgcctgtggcccgcgaagtcttccagctcagcagtgtctcgttccctgggggacggtagcagaccga

SEQ ID NO: 10865 - DNA, 1663 bp, Homo sapiens
  source 1..1663: mol_type = unassigned DNA
cgcaacggggcgggggcagacgtcttcagctttagaactccgtcgggttcatcgctcagtgtggacgatcggcgcccccacgagacccatcgagggcacatagtttccactccagctcgcttcatccgacccagacgatcgccagcgcggccagcggccagcgcacagcgagctgcctgggcaactgtggccggatcctagggagcaagctggcttcgggccctacctagctccacccggctcctaccggccctcccacctaggagctggaggatggtcccggggcgccccagggggactgctggtccccggagtctccagccagacgcgccttgttgtgtgagccgcgtgcgcgcccaatttggaggcagccgcccccgccgctgacaggtgctgcccagagggcgccgggtgcggtccctggcgcagctggacgcgcacgccccggtgcgtgcagcttcccgagctcggtcagagagaagagggagccagggcgcggcctgggggacgccagtggactggagccgcggagcttcgagggaaaaactttgcaggcgccgcggccgggattcggttacggctccagcccaccccagcaggtgcgggaggaagaggcagcgccggagtcccgaggccagagagcctcggcggcggcggccgcttctttcccccgagctggcctgaagtcgctgggcactcccggtttctgctgctgcgcccgccgccgccgccgccgccaccgccagcgccgcggggacccgggaggaggtgcagccgaagagggaggagaagcaggaggaggaggaggaggaggaggggagaggaggagcagggggtggaggatggagccccgggctgccgcggcgggcgagccagagccgccggcggcgtcctcctccttccaggcccggctctggaagaacctgcagctgggggtgggcaggagcaagggcggcgggggcgggcgcgctgggggtccagagcgccgcactgcggacaccccgtcgccctccccgccacccccggtgggcacagggaatgcaccggccagggggagtggtgcaggcagcaggtggagcggcttcaagaagcggaagcaagtgctggaccgagtcttctcctcctcgcagcccaacctgtgctgctcgtcgccggagcccctggagcccggcggcgccggcagagccgagcaggggtccacgctacgccgccggatccgcgagcatttgctccccgccgtaaaggggcccgcggcggcctcgggagcagcgggagggacgcctcctggcggacgctcccccgactcagctccttcctcttcctccgcctcatcctccctgtcctcctcgccccagcctcccccgaggggggaccgcgcccgagatgagggtgcacggcgtcagggccccggggcgcacttgtgccaccagaagagctcctctctgccgggcaccgcctgcctggagcagctgctggagccgccgcctcctcccgcagagccggcgcggagtcccgcggagtctcgggccccggagacgggcgaggagcacggcagcagccaggtgagtgccggtggcgcggccggagacaaggtgcgcgggaccacgcctccctcttcaggcgttcaccacccggggagcggggggcgggggccgggaggcgg

SEQ ID NO: 10866 - DNA, 2065 bp, Homo sapiens
  source 1..2065: mol_type = unassigned DNA
cggagtaggtcgacgagagatttctgagaaggctggcagaccaccgcggatctttgtctttttacgtggagccatgggcgaggcgctcaagaacttgctgaaggagctcgacttcttcaagcctcgggccaggtcctggagcatgaggtcgtcagccaggacgcccagaaatgcactggtggtggaactgaggatggtggcggccacctgtacggggcgcctggcagcaagactgccacttccaccaccggtcgcatctggctccgtggtgcctcgcaggcctggatcgccaagaaggcggcgcagcgcgtacgaggagccgggccgcaggtactggtaggcgcgacgcccgctgtgatcacgcacgtgcacctgggcacccagacgcaccaccagcagcacggcagcgtcctcgtggccgtgcagtgcagccaggtgcagcggcgtgtagccgccgtgggagcgtgcgttcacgtcgactggtgcgccactgcgccgcgcgacctccaccagctgcagcgccatctcgccgtcgccgctcttggcggcccaatgcagggccgtgaagccagacatgaagtcgcgcttggccgccaagccgcggtcgcgcagcagcagcccgtgcagctggtgggtccagcggcccccggcagtccgcacgagccactcgtgctcggacggctccaggggcaccgcggacggcggcggcgcggcgggcaactcctcggcgtcagggctcagcagacgcgggccggcgcgcgacaggcgcctcaggtgcggggagcggcccgggcccaggccgaggcccagaccggactcttccaccgagagccgcctcagcagcagaggggagctccgcgggctcggctcctccgacagctgccggcgcaggccgggctcctccgcccggaggcggagcgtggcgggggccgggacgcagcgcaccggcagcatacagggcttctgctgcggcggccctttcgctgccccgggcccgggctccgcgtctggcggatcagagcagggcgatgccgcctcagaaggggccctaggcggtggggccgcgtctgcggagggtctctcggtggcctgggctagctcaagggctggaagcggtgggtcggcggaccgctccccgggcggctgagcgggctcggaggccggcccccccggggtgtcctgtggctctgttggcagacccaggtcccctggcggctccactggccgcggcacccggaccaagggcggagctcccggggcagaggcgctccgcggcaagaccgtcgaagtgggtttcgacggctgggccgctgcccccggggggccgaagggtgcgggctcgggctccgggggccggggcttcttcctcagcaccacgaacttgacgccgtcgagctccttcaccaccgccacgttgttgacgaactgcttgaagcggtccctgcgggcggcgcggccccgcgggtcgccggcatcgagcagcggcttgaagcggctcagcagctcggagttgcgcaccttcccgccgtgctcctgcaggaagcccagcaccgccgcctggctcaccccggcagccgcagcggcggcggcggcggccagcgccatggtggggccctgggttcctggctcccggggcgggtgggcgccgcgtcgccgcgggacgcgcgggagcggggttccgggaggcgcggccgcgctcacctggtgccttccccgcggccagccgggcgtgtccccgaagctggacctcggtcgcgccagtgccgctgggccggggcgtctcggggcgaagggcgccgggggccgcggggagcgcccacccccagcgccccgccgggccccggccttcggggtaggtttctgcctttgtattctgtccaatgggcgcctgcttccatcccccgcgccgcgctcgccttacaggtgacagctgcccccgcgatgcagagggaaccggagcagaaattcccgccgccccccgcccgccccagaattaaaggcgcagcgctccagctctggtctcggttgctaggtgggtgtgttccctagggacgccgcggtccgc

SEQ ID NO: 10867 - DNA, 3487 bp, Homo sapiens
  source 1..3487: mol_type = unassigned DNA
cgcgcgcctccagcccgcccctggaggcagtccgcgggaccgcaggctggaggcgcgccggcgtgattccgaccgccggagccgggaggaggagccggaggaggctgcggggggctccggcccaggcgaaggaagggcaagaggctgttcgaccgggggcggcgccgggaggtgggtgggcttaacacccaggtcgggggaggggtttaagagacaccgggaagggcagccgagccccaggggcgggtggggtggtagctgtgtgtagtaggggacagggctgggcctctggaagctagagtgaagccttcctggctgtctcgcaggcaaccccatcctctggcagaacagctgcgaatcgccaagttgacccctctcgtcccttggccgagaggagaggatgtctcaggacccagggatgggcgggaagaaaccatggggagccacaagtctgcacccaggcggggaggaggcgggcgggcgccgctccgcaggcgcaggcgagtgggtgggaagaagggagggagagggaggaaggaggtgaggccgggaagatgccactgccgggggcggggcggggccggggatccggcaaagggactgcagcagcgctaggtgggggcgggggctgcaatgtcactcatttgagagtcaggtgtgtgcgtcccaaacggggtccgccacaagccggcatcttcctggtaccacccatggtgcagggccctaggcagagggctggggactgcggatccgtccctgaagcgggacgcgaaccggcagagttgggagaaggtaaacaagggccacgccccctgccgtcgccccgcgggcgcgcacccgccgctccggccgccgccggtacatttccactctcccagcgcctctccccagctggactaccgcgcggccccggaggtggaggctgcccccgaccccagtcctcacccctggcgccgaggctccgcaccctccacactcacctggaaagggtgtcccccgcccctccaaaaaaactgtctaatttgtgcagagcctccaaccccaggagccgagcatgctgcccccgcgtgcagcgcccgcgtgcaccgggccgggagagggggcgacagggcggaggcggtggcccccggaaggtgtctgggaccggaccggctgcacgtgagcccagcgcgaggtcatgtgcaccggctcagcccggttcggcgcccggacgtgctgcgtatcaacaaaatgaaactcggggagacaggagggcagatagctccaggttctcggagcccccgcccgggccgctcgacctccccaccgtacccatctcccgccgcagcccctacgcccggccggagcccgcggggaagttgcagccctggcgcgcccccgcccgcccgcgccccctcgccggcccgggggcgctttgccgcagtcattaataaagaaggtcgccaagctcacccttccaaaagttgttgttgcatgcgcccctctcagcctccccgcactgtactctttaaaacacgactgaccaacatgcgcaatctctctcccctgtgctgtgcatcccccccctctccgcgctggcttcctagaacaggcagccagcaggagagagagggagcgagcgagcaagagagagcgagggagcgaagagcgctggcagatctgttgcaaaaacgccaaataacgtcgtggagatgcgcagggcccatccgccgggggctggatcttaccttgctccgcggtgcccccctgacgggcgctgccctcggctacgcgccgctgcagggaccggcgcgggaaggatgctcccgaagccgggagctcctggggccggcgcgggagggcggggggcgcgcatccatccggggtcgcggcgagggaggcggccgggcccgcggcgtcccaggccccacgccccccgccggggacggtcggcccgcaggacctaagccggtgccgctaggagtgggcgcaaagtaactccatggacgctactcaccccccccaaaaaatagcctccaactgcgatggccgcggtcggcaccattcaccaaccccctgtgtatgtttctgtttctttttaaaccaagacttccttgtgatctctttagaaaaaaaaaatgtgttggggtgggggtggggtgggggcgggcaggaggagcgagggagggggagtagccacttttttcttattcactcggatctccgctcccgacacccccgtcgccgcccccccaaccccccgcccagttgtttggctccggcggggagtccaggtagcgttgcgggccccgtgggggaagggtgccctccctcgcagccccaccaccacgcctgctggcaccctgggcccggactccccatggactctggggcgcccctagcccgccctgtccccagggccgggcccgagcggcggctgcgcccgtgcaagtcccatcaggtctgctcacacttcacacactcacacacataccccgcccctccactctttcactcacactttctgctcacaccccgccccctacgcgccccagacccgggcggcgccccccgcaaccttaaaaaaaaaaaaaagcgagcttatacttaaaaaaatcttttggcgccatattaatgacgtacttaaaatttgccatttctccctgcgtcaaaaagacgtttctttgcaaataacagcctggaggcgacactcgcggagggaacgaggtttgcactgagcaccccgccccccggggctccagcgctggaagaccctcgccctaggccctgcttctgaatcgctggttttaaaatgcgaatcgaataaattgcgtggcgttttgcagcaccagaagtgagcagaaagtgctggcaggaggggagtggaggggcgaacgcgagtcttggggagggggcgcggccctcctccccgcacccactccaaatggaaaactaacattccgggcgggggaacttgaaattgtaggcgacctcaagaaaagaggggcggtccgtagagagggtccccattgggctcgtcgccccctcccccctcccgggtgcctcctggcgcctagcgctgccccgcatttccggggggtggagaaggcagtgatgagcgggtgggtgggtggttgcacatcctggccccagcaggattttgccccggggcgaccccttcctccttgctcttccttcccattaccccgaaaggttaaaaaccgaggggtaacttccaaaggctggcacatggcgaggaagcggggcgcccctctccccacccttcgcctcctcgcccctcctcctccggctccacttcccgacttgaccttgtggtgcacaaacagtacgctcggatcctcgcagtttctggaagaagagcctgcgctcgccaggcgggcgggctgtcgggctgctagccggcggtggcggggccttgggtctgttcccggagccgcgggccacacccacccaacccgctgcgcccgccgagctcaccttctctcga

SEQ ID NO: 10868 - DNA, 847 bp, Homo sapiens
  source 1..847: mol_type = unassigned DNA
cggtcgctccagcaaagttcccaacttagtcgacatgacgcgcggcgcagccaatgggaggcggagttggcgtttcttggtcgggggggggccggaggggtgggccccgcgtctccggtgtctgccgtgctcactgaatggagagagcgagcgccggccagctcacccggccgccccgtgccccagccgcagccgccgcgctccccagcccagccccaagccggacctccccgggcgccacgccccattgcgctcgccccaggtccccaacccggcccgcgggccagcggggccagggggcgctccgcacctgggcactcccagcgatgcgcagcggggcagcgccggccccgccgatggagctgctgttgctgccgccgccgccgcccggagcgccccgctccgcccgcgccccgtgcgcctgagcaccgagctcgcccctcctccgcgctaactccgccgcccgctccccaggccgcccgcgctccccgcgcgcctcctcgggctccacgcgtcttgccccgcagaggcagcctcctccaggagcggggccctgcacaccatggcccccgggtgggcaggggtcggcgccgccgtgcgcgcccgcctggcgctggccttggcgctggcgagcgtcctgagtgggcctccagccgtcgcctgccccaccaagtgtacctgctccgctgccagcgtggactgccacgggctgggcctccgcgcggttcctcggggcatcccccgcaacgctgagcgcctgtgagtacccctgccccaccccacgcgggccacccacctgggtcccaccgagggggccccaggcgccagatccgtcctttcccctcgg

SEQ ID NO: 10869 - DNA, 909 bp, Homo sapiens
  source 1..909: mol_type = unassigned DNA
cgggacgggggcgagaccctgggccctcaggggcactgaggggtcgtccatgccgggggacatggccacttgggggcggccctcgtcaaccgcggagtggggaaaaggggggagggatggaggacgaacgcccggcggtgtctaaaggcacgacgcggagcaggaaccacagccctggtccccagaaagcgcgcgcggcccggggcagaacctgccgaagttccagctcggggcgcaagggatgtgggggtcactggaagacggggcgcgggccgcccgtggggaggagactggacccgaacccggcccaccccacccgagcggcgacgccagcgctgaccccaggcgtgtcccggcccccggcgcggctccggcccaaccgtgcacgcccgcggaaggcctcgcacccgcgtcagaagtggcctgcccggggccaccggcccgcaagtccccggtgttctcgaggtccctgccccgtcccgcgcggctgtagccggcgggaggggctgagaggcgggtcgcgctgggacctaaggcgccgccccctcgccagcctctccctccctccgtcaccgggtggccggagacccgggggcactgctggggtaccccaaagcatagggccagcctgagtgcgcaaggtcctgaaaagacgggggggcggcgacaaggagtagggaggggggctggaggaagacggcaaagtgaccccggaagggtccaggcgccccaagcccatcgaagacgggaggctctcagtggcgcctggggggactgtgggaaaagcagctcaagaaggggaatctggagcgaggtgggggagaggtcggcatggccttctctaggagcgccagcgccagacagagcggtgacaggccgcaccgggagtaccccgtctatactgaacgg

SEQ ID NO: 10870 - DNA, 2150 bp, Homo sapiens
  source 1..2150: mol_type = unassigned DNA
cgtctttcgtggccgggaaggccaggccgagcggggcggtcagccgggccgggaggagggggctctccgggccgcgcggccgcacaaagcggggagatctgctgctgcggcggcatgaggcgcgccccctcccgcgagccagcggagcgcgcgcgcccgcccccgtcccccgccccccgccccagcccccggagcgccattcgcggagcggcttacgctagtcgccgggcgtaccgcgccccagcggccggggaggtgcgctgcccggctcccgtaaagttattgtgaatggggagcgggtgacgtcagcgccgaatgtcaacaatgtagcgattgagagtgtgggcgttccggggagagcgcaagccgcgcggcgcggagcaaacagcgccgagccgccgccgcctcagcagcagcagcagcagcagcagcggcagcagcggccgtgcacgcccgggctgcggtcgcacagcgctaacgtgagcggccgccgccctcgccaccccgcctgcccactcccgccgccgccccgctctcgctttccccccggcctcccctcgccccttcccctcccccttcccggcgcactcggggggctgggaacgagctgccatgtgatgcgcgtcccctccgcgagctttcggtgacccacgaactgcccacctcgccggctgccgggagggggctgcgagccgggaagacgcggggaagaggaggcggaaaaggacgcaaagttctccggcgaggtgagtcccgggccccgggccccgggccccgccgctgggcggggtggcggggcaagtttgcggggggagcgggcgcgcggggcgggcggggaggcgtggggaaacggcgcgggaagggagccccggccgccgggcgcgcagccgccctccccgcgccctgcccgcttttatggcattttctaggaacgggaagggggtgggagccgagccggcggccgcgccgcgccgaatgtgtgctctccctcccggctgtttacggcggccgaggcgcattgtattttgctggcgtcgaagggtgttttggaacagcagagggaggaggagcagagagtaataagtcaggcatggggagggcgggctgcaggaggcgcgcgtccgcgcgagccgcagcagctgtcagacccgcggccctgcccccggcccggcgaggcccgggtgtcccggcccccagcctgcgatcccagctccaggccgggcggcctcctccttaaccctcggcgtgcgcatcccgggctgctccgcgaggaccttggccgcggcgcctttgcgctcagctgtcagccgccgccgggtggcccggaccaccgcgaccggcggggaatcaaagcccaagtttagggtcgcaggaagaggcgagctgggggcctcgcggcgcagacctggatcgaatctctcctagcgaaagatcgggttgtcggaaagcgtcccgcgtagctaagacctaagggcgccaggcttctgagagggaaaccttgcacctcctctcccacagatcctccatgaagtcaaggtgcaacacacacacacacacacacacacacacaccctacactccagtctccaagccccagaagcttcacccaggagactggtttatgaaggggacactgccctccccgtccccgcgtcgaggcgctccgtggccccgctgtgcttcgctcacccggcgggtgttcgggagcccggcgccgctggagacggcggcgggcggcgctcacgggctaccctaggtgcccacgaggggagagactggagcgagcatctcggcgacctcggtctggccaagcatttgcaggaactcggaccgtgaggggaagcgtgcagggccgggagtgagtgtgtgaaggggtggcacactcctggcttctggggtcgcgggcgcatggggcatccccagcactctcccgcgcgtaggcgagtttggtaacttgagggaagttccggcgcggccgctgccggggtggtttgtctgtggcccgatgaggcgcgcctcgcagcctgctctcccggtcaccgccgtcgccgtgacctgtggcctccaggaaacgagagggaccggggcgccccacccgcgagacggacccgcagtctcccggcgggcccgcgggcggcgagacgcggcgt

SEQ ID NO: 10871 - DNA, 506 bp, Homo sapiens
  source 1..506: mol_type = unassigned DNA
cgcctcacgacgtccatgctagggcctcccagaccagcggagaaaccagcagccctggaccgcaagcggcggggtcagggaggcgacaacgggaagcccctgccggaccctggacactcaggacctagtgctgcccgggcgccctcccgcagcagccccagggcgaggaggatggggggggtcctcgcaggggccacactgtcggagccccacggatccgggcgggacggtgaggcctccacactgagccggtggcaaagtccccgcgaggatgaaggaggaaccccgtgctcctcaccccaccaggccccgcatttcctggctcctcctgtctcaggaaccgcctgtcccttgccgcgaccggcgagtccttccgggtcttcctgaaacagtttcgtcccgaggctctggatctggaagcccaggggcatcgtccgggagcggggcacccactgtgggtctccgccagccagcactcaggcccggagctcggggacagcgggcgc

SEQ ID NO: 10872 - DNA, 1503 bp, Homo sapiens
  source 1..1503: mol_type = unassigned DNA
cgcgctcctgggtacccagaaataggctttccccgggaatccgcctccgaccgggcgtctctacaacacctgaagcttctcaggacgccctctgagctgggcaaggcgagaggactttctcccagagcccagccccgagcaatgcccgagctcgcgaggtggggctgggggcgacaaggaggcggagcggggacttagccaccggggactcctctccaagtcagttcccaaaccattcggcgtcatgcatccacagcccgcgcgcagcccgtgcgccctggaccctacccaagcactaggctcgaccagggccggtccgaaggtcaccgtctacggccagggcagaggggcggcgggaaaagggcccagtggaccctcggtccaggagggccggtcagctgttgggccgcgggcacccaaagttgcgggggtccgggtctccgaccccacgcccagcggggctctagtacccgagggcgcgcgctgcgactcgcagagcagcgggtgcagcaggctggcggggctgggaccgcgagttttgtttgcaaagttcaggcggggcagacgccagggagggggccgcgtccacgcgggcagccccggcgctgacaggtagcgacgcactccctcgtaatccgtccaccagcagcctaaagtgtgcactgggttcccagtgaaatgcctggccttgaaagtttagccaacatcgggtccagcggagtcaccagggccgccccctgccccgcagaaccaggttctggcctcggccacggtgggggtcccgtatcagcccgacaaccccgaggtcacgcgcccgaaggactctctgggacaagaagtggagtggggcggccaggacgcgggccgtggggatcgcgagggaggagggggcggccgcccggacttaccccgtggggtccccgcgcgcgggcgccccggcgtgtcggatcatgccgccggcagctccgggacggggaacggaggcgctcaggcgccgggccgcgcggaacgcggagtcccgggcgcccgcatgtccctggctctggccctctggaagggccaggccgccgctgccgccgcgctctggggctctcgctcccttctacttcctgtatcggagcgagcggggctttcaggaagaggctggccttggtggtcaagggtttttttgtcaaaagccattcggcagcggctcgcggcccggagccccctggggcacacggaggcccgggcggccgcgcccccggggccgggcctcggggcggggggtgctggggccaaggcgccgcacgggcgcccaacctcggggtgccgcctccacaggctgtggctggggctggggcgcgggaggcccgcggggcttcggagagggaaacttagagaaaagtcttccacttggcttggggccgcaggggaaggaagacgccctccgcctgtgccggcgccgaccgcgggccggcaggtggggaggcccagagctggcggggagttcgtcccactcgg

SEQ ID NO: 10873 - DNA, 907 bp, Homo sapiens
  source 1..907: mol_type = unassigned DNA
cggcccacgtgcctttcatcctggcccgcagaggcctgagtgctgtttcgggcagctccgggcagggctgggtagggcccagcggaccccacgggccgcccccccccgcctctccccagctatttgtctgtcgtccctcttcgtccctcttctcctgaggtgctgtcccggccctcggggcgggggcagccgcgggcagctcagtccgcagcgcttccagaggtgcccgagtctcctgaacgctccgcaggaaagcagctgtgctgcgtggagccctcccctcgtcccggtccctccgtccgtgttcctgtccctcccgttctgcggcgggaggtggcggtgtgggtctccggggaggcgcggcgggctggggaggtggggaagggtgtgcgcgtgctgggggtgggggggaaagacctgccgccccccccccccgcctccccagcccttggttgctatgcagtttctatggcagcggcatcctcagactcaactttcaccctcgtttagagccaattaaggtaaaatagtgaggggaggagggaagagcgtggccagggaagggaggggggagaggcaggaaattcaattcgaagctgcaagtgcagcgtttactctgccaaagtcgcagtacagattccgaagccgcagcgccgtcccctcctttcctcgccccagcccgagcgggaagcggcagcagctccccagagccctggcttggcagggaggggacggcgcccgagcagccatattgcagccccccgggtccctcctccggccggcgcaggccccgcgctcacgacctcctctgggagccggatctgtcctctccatcgccgccacccgccggcctctgcgtcccttggcttccgacatcccgtctggccgtccccctgtgccggtccga

SEQ ID NO: 10874 - DNA, 1925 bp, Homo sapiens
  source 1..1925: mol_type = unassigned DNA
cgggttctccgccgctttggggctgagcctggtgtcgctgttcacattgaacaggacgtcctcctccgtgagcggcggaaccgccacccggtaaagcgggtgctcgaacagcctggccaggagggaggcgtctccgccggggccggggggcgactcggaccgacgcgggccggggtctcgcagcagcggccggtgcgcggggtcgtggggtcttagggcgccgggatcccgcccccgcaaggcgcgctcggccggctcggccgcgggcggcagtttctccagcgagtgggacgagaggttggaggaggggtcggagctgaagtcctgcaggatgcggagcgtgtgcttgttgggccagcccgcgtcgccggcggcggaggaggcggccgggggctccccggggcggccccgaacctgggcccagccgggcgcggccacctcggcggcgggctgcgcgcacgaacagccgggctcccccgagggccgcgcgccgcgtcgctccagcctgggcagcaggtccagggcgatgtgcagcgcgcaggccaccaggaacaccatcaggatgagcacgcggaaccggcgcaccagcatcatcttcatggccgcgcgggccggcccgggcctggagcgcgttctgcccgcgcgcccctctagctgcagctgggcacgagcgcggcgccgcctcgcgggtcaaggtccatcggtgccgggcggctaccagctccggggctgtccccgggcccgggccgcgtgcagggcgcccgccgccggagcgctgggtccccgcgccatctcgggcccgtccccgctcggcctctccggagcggccgcgccctcagccggggagcccaggggtcctggtccgcggagccgggcgcgcggggggcggctggggccgcagcagggggaggctcggcgctcgcagccgccggcgcggggctcatcgggcgtgtgggtccatcccggccggggcgcgacgggcctgggcggtggcggcggccgcaggcgtcccgatcctcagcgcgctcctctccaggcgccgggcgggcgggcggggaaggggcggctcctccgggccgggctctgctctcacgccgcgcccgggagaccggggctggggggaaggggggggcgaagggcggaaggggtgggcgcggggagcggccggcggggtcccgggcaggtgcagcggccgccccgagcgcagctcccgcctggccgagcctctcggcgccccgcgtcccgggcgggcagatatcgagcgccgcggagccgccccccgcgtcagcgcccacagattggcggagccgccgccccacgagtcacggctgggcccgggccggctgcgctcccgctctccttcctcctcccctcggccgcgccccgcgacgcctctgagctccgggcccgctaaggagagggctcctcctgcccgcggtttgcagagggaagcggcggagaccgggagggcgcgctcggttctggccaggccagcagctgcggccgagtggggggctccggcctggccgcttcctgggaccccctcccgcccggggccgccgccgccagctgcagcctctcggctcctccccagaggagcgcggggccggggcccaggccaagtccctccccggagccgcggggcgtctgcgccgccggatgagctccccgccgggcggcgaccccgtgccccacgcccgtctcggcaaggaggaggcggaggcggccccgcgagagaggcccaaggagcgactgggcctggacccaggggacgccagggcagcggagctcccggcaccggtcccgtccccccccccccgcccacccgcgggacgcgcccgccttaaccctccaggcgccgggcccgctgggggcgctgagaggggctggtgtgccgggggcgccttcctgcttggggccgacgg

SEQ ID NO: 10875 - DNA, 1287 bp, Homo sapiens
  source 1..1287: mol_type = unassigned DNA
cgcgtggcccgggaggctcccggaggagggaagggcctatctcagcgaggggtataggcggagaaggtgcggggcgaggcggccgcgggtccctggcatccctctccttacgcccaggctaagctggcggtgctgctggtgacgctggtggtggccgcggtctcctacctgcggatggagcagaagctgcggcggggcgtggccccgcgccagccccgcatcccgcggccccagcacaaggtgcgcggtgacggctacttggaggaggacaactcggacgagagcgacgcggagggcgagcatggggacggcgcggaggaggaggcgccgcccccggggcccaggcctggccccgagcccgctggactcggccgccggccctgcccgtacgaacaggcgcaggggggcgacgggccggaggagcagtgaggggccgcctggtccccggactcagcctcgctcctcgccggcctcagtttaccacgtcttaggtcggggggaccccctccgagtctcgcgctgtcttcgaaggcccctgtctcccttcccccacgttggggacgcccctcccagagcccgggtcacctccgggcttccgcagccccctccaaggcggagtggagccttgggaactccccggccaagcacaggggttcgaaaatacagctgataccccgcgggcccttagcacgcgccccagcgccggagcagggtcagggtcttcttgcgacccggccccgctccagatccccccagctctcggccgcggacccgggccgcgtgtgagcgccctttgcacctcctatctccagggtccgccgagagccacgattttttacagaaaatgagcgataaagagattttgtactgtcctgactggagagtcccaggccgcgggggacggagcgcccctgggatgcacgcccggctggcccggcctctgggcgcggtggtgagaggccctgacctagggggaccgcggggtgtggggagtgcggagccccactgggggcggggcgaggtgtccgtaggccccgcccaccagcccctcctccctcctgaggccccgcccccccatgcctgcctgcctttgccagcctcagccaggagaagggagcgggggagcggctggcagagacagaggagggtgtgacggcgttgctggtcccccatgggtccagagggcgagacagactccgaaggcacaccctccaggggcctgtgtaggcatcctcggccctccagcgaccacccccgcgtcggacagggtccacttccgagccacgg

SEQ ID NO: 10876 - DNA, 2906 bp, Homo sapiens; identical to SEQ ID NO: 5674
  source 1..2906: mol_type = unassigned DNA

SEQ ID NO: 10877 - DNA, 2146 bp, Homo sapiens
  source 1..2146: mol_type = unassigned DNA
cgaaagcggccctgagagcgtcctcggggctccttcgaagtgtccaaaccaccagcgtggccagcggccccgactccccaccacgtcctcctccgcgggcccaaagggacctgggccccgcaaacccctgccgagggagacgcccgccgaccccgccggcctacggggcgccctgctcccctcggggcggcttctcaggcaggctgagagcgaacgggatgagcacaccccggacgtccaagggggcgcccagcgcctcgaagccgccgccctggcctgcgtcgccgccggcctcgccttcccgggcaggctggaagcgccaggtgcccgcgcggctcacgcagtagatggcgccgtccagggcggcgcagcggaagggctgcaggcccgtggggccgccggggaggcgcaggggcgcgacgcacgggctccactgcttggccaggcagtggtatcgggacacgctgaccccgctcggccccgccgcctgcgcctcgccgcggctgccgctcagatcgaagcggtagatgaagccgtcgagagccaccatgtcggccgagcgctcgcggctgctgctgcacgggcactcctgccactcgtcgcgccgcgggtcatacttgagcaggcgatagaagagggagcccccggacacgtagatctcgccgtggcaggtggtggcctcatgcgccacggcgaaggcgccccggggcagcggcgccacgggggcccagcggtcggcgcgcgggtcgtagcgctccacgctgagcaggcactcgccgcccacggcgtagaggtgaccgtccagggccagcagccgcagctgcgagcgcgcctggcgcaggggcctcacggcgctccagctgtccgtggccgggttgtagcagaagacctggtcggacgggcgcgcgcggccgtcggggcccgcgggcgccacgccgcccgccacgaagaggtagttgtagaggacgcacaggccgcagccccgcgccggcgcgccctcgggcagccgcgtcagctcgcgccactctccggccgccgcgtggaagcagtagacggccgcgtccccgcgcgcgtccgcgtcccccgaggggctctgaggccggctgcccgcgcgctcccccgccggcccgagcgccgcggccaagaggtgggcgcggccggcgcgcaggcggcggcgcagcagcaggtcccgctctgcgcccgacaggcggccgaacacggcgggctcgcgcagcacctccagatagtggtcgctcatgaagcagtaggcggcgtcgcgcagctcgttcagccgctgccgcttggccgcgctcaggacctcgtagcagttggccaggctcagctgcggccccacggcgtcggtggcgcgctgcgcggcgccgggcagctgcaggcggcgcgcgccggccaccacctcggccacgttgtcgggccgcacgcccgccatgcgcccgctgtaggcgtcggcgaggagcagccgcagcgccgtcaggctcactccctgcacccgcagcacgtcccgcgacgcgcgcgcgcggaagtagtcgctgcgcgccgccagcaccgccttgtgcgcgcgcagccggcgccccgacacctccagcaccaggtccggctccccgtacaccgccccgaaccccgggggtacgggcgcgggctccccgggctcctcgggggacgcggggtcctcaagccaaacgcgcggttcgggggacggcgccgcgggctcttccgggcacgcgcgctcctcaggggacgcgagctcctccggggacgcggcgcccgcgctgccggcctcccactgccgctccaccacccgcgggccaccgctggagggcggggaggtggccgcgccttccgccgctgaggcgagggactgcggcggggactcttccccggagctgaagcacagggacgcgccgagactgcagggtgtctgcgccggggacgcggcgccctcgctctcgctctccccggcagccccgggctcagtccctgggtagaggacgcagggggccaccgcgtgctccatggccgggctgtgctgcgctgcgcccgcgcgcccccggttccgcagcctgcaggtctggccaaggtcgagccttactccggggtttccagcctcacagcttttcctggcacgcga

SEQ ID NO: 10878 - DNA, 865 bp, Homo sapiens
  source 1..865: mol_type = unassigned DNA
cgggagtcttctcctcccgtgcgccgctgcccgggacgagaaacccgtggggcatccaggactaggacacgaggtctcagcctgggcaggtggacaagctgtggggtcccaccctccgcaggcgatggcttcccaaagtctgtacaaaccggtttcgccgggccggccatgcccgcccctcttctcggcgtgggaagccctttcaaaagtggaggggagcgagtgtcgcgccctgccaaccccgactgcgcctgggccctccccgcgccgggctccggagccgcccctcctgactctgcgaccacggccggggaccctgcgcgcgcccgggaatgcagagtctccagcgccgcgcagggctcgccccgacctcggccggccctgggcaacccgctccgcggccagtccccactccaagatgtggctcggctcccacctccgcgggggggaaatgtcgggcgacccccacactgaccttcctgcgcacccagcgcaaactacgaacccagagttggagctgcccgcagaccccgcgcagccagaccccgcgcctttatcccgccccgccccgccccgcccggcgcaccaatccccggccgaggaggggccgcgtggcgccgcggggggcgggccgcgcacgccccccgcagggaggactcagggacagtcagggccccgggagagtccgcgcgcatcgcccggctccgcggcgccagccatggcgtccgtgcgtggccccgccagggatggggcgacgcggtcagagccgcacgcgaccgaaatccgcactctggagccgcagagcgcgcggtcttgctgtttagcggctccctggcaagtgacgtggggaagaaacgcagggcgc

SEQ ID NO: 10879 - DNA, 865 bp, Homo sapiens; identical to SEQ ID NO: 10878
  source 1..865: mol_type = unassigned DNA

SEQ ID NO: 10880 - DNA, 1463 bp, Homo sapiens
  source 1..1463: mol_type = unassigned DNA
cgcaatttggggcccgcagacgcgcgtggacacaaaaacacacgctcccgagatccaccctccccgggccacactgtggggctgcgtccggggcacgggccatgcctgaaccttcttccaccgccgcgccccgggcccgcgccccgccggccgcccgcactgggtcccgcgtcgcccccgccaccacaccgagccgcccagtacctcctcctcctgaaggttggcctcgctcggggtgttctccttctcggctttgccgccgttgttcatcttcccggtccttcctcgccgggccgggcagggctggggcgcggggctgggcgagggcgcgctagcccactggagccttccccgggcgccggggctccctcgggcgggcgccgcgggctgtggggctggagctggagccggggcagtggctgtcgggctcgggttgggctggggctcccgcggcgagtctgcgacggcggcggcgggcgactcaggaagtgcaagggagagacggggcagggcgcgggccgggagcggggcaccgagacaatcgggccccgggagggcgacctggagagggagggcgggagccaggggaggaaggaagaaggaaggaaggaaggaagcaaaggatggggcgaggacgcgcgtcccaggagtaagcgcggagagttggggctgggggctgcagccgctggaaggaggggacgggggtgcctagagaggaggaggaggaggaagaggaggaggaggagcggggcggaggagcgcgggccgcggctgggacgctgggacccgagagccgctgagtacgcgctccaggcaggctctgggaagtccgggatggaagcagctccctttctctcgccttcctccctcccctctcccctccctcctctccgcgcctctcctcctccctccgccctccctggacgtgggctgccggctgcagcccggagggacggggcgcgggacggagccccccgcgggaggaggggccggcggccggatggcgcgcgccggggaggggcagcgggccgcgggcggaagcggcgaccccagcccccgactcagcggctggtcggagggcgagggcccgggaggccgagggcagggaggtcgggtcccgccgttcccttggcccccgggggccccggcgtctgcgcgccccgggacttcggggaccctgccccgccggggcctggaccgggacctgggatgtgtgcgacttttagtttgccggcttttaccgagggatttgcacccctggccctaagcccacccttcccgagccagacccggttcttcctctgctgcttgaatgacagcatgagaactcgagggacaccggggacagcccactccgggccggctttttcaggacagggcttcaaacccatctccagcgcgggtcctgcgacgcgcccggagccttccccgcttcgcttcctgagcgtcccgcggccccccga

SEQ ID NO: 10881 - DNA, 1437 bp, Homo sapiens
  source 1..1437: mol_type = unassigned DNA
cggtcccccggagctgaggtctgcgcgactggatttaggggcagaatgagtgcgtcgggaaccccaaaaccctagatcaagatacaaggggagtcgacggcccggaaacctcgctgcgggtgccctaagcgcgaggccgcccgggcagggccgcccagggaccggggcgctgggtgcggggcacggggctccacctcccgcgggctggggcgcgcagcgcgcggcccctttaagaaagttcgccgggcgagttcatcaaagtttaaaaactcgccgtggagaagggcgcgggggaagaggagagagggagagcgctgacccaggcgagagagaggggaaaggcccggccggaggccggcgccccgcggccggggccggggcgagcccacggtgggcggtggggattggctgcgcgttcccccggagaccgcgcggcgggcgggggagggggctggccgggccccagctgaggccggttccggccccgccccccgccgccggcgcccgccccctcccccggcgcccgccccccgccgccgctgccgccgccgccgccgccgcggcgcactcgccggtcgcagtgaaaaggcggaggcggcggcccctccggctcccactgcctcccccgccgcaccccctccccaccttccgcacccgccaaacttgatgtgaccctggcccgacgcggaggctgcccctctcactgccccgtgggtcccccgccacccgctccgcacccgcgagcgcaccgctccccgcgccccttcccacttcccgcggggccggcgccgcgctcgccctcgcgttccttcccgccgccccctcccccgcaccatgagcaacctgaagccggacggcgagcacggcggcagcaccggcaccggctccggcgcgggctccggcggcgccctggaggaggaggtgggtctgtggccccgggacttgccgggtgaagcgcacgccaggcgggcgcgggagagggcgagcggggcctgccgcgcctcgcggggccggggtggccatcgctcccggcgccttcccgccgctgccctctcgcccgggtaggagcggcccgtgtccgcgggcgggagcgtgcggcctggactgccccgccggacaggcattgtctccccgccctctcgggctcgaggcgggccgcgcgcgccggccgccgtccgggcgtcccgcggtgggcgagatgcgccgcgtccgttccatgcctgccgcccgcgcgccccttgctccccaccccgtagccgctcgccgccctcctccgaggcgcacctcctgcgtggccaggaccccgcctcggcggcacggagcggagcgggattagcacggcccgagggcggcaccctcactccactgccttttccgccctgaccccctccccgtgaccttggaggcctgggccggccggctcctcggttcctgcga

SEQ ID NO: 10882 - DNA, 717 bp, Homo sapiens
  source 1..717: mol_type = unassigned DNA
cgaggagaaaggccgccaaacggagcgagagctcccatttccacccaccccagtgctatggtggcacatgccgaccaccacctgcgaggcctcttcgcagacttgctccctcggcttcgcagcgcggacgacccgcagcgtctcacggctatggccttcttcacaggggtgagcctgcttcccggatgggtggtgaagggtgaccctggacttgatccctgaatcgcagcggcctgcacggggaccgcgggcgtgctgaccccatgtgcctcgcctagctgttgcagagccggcccaccgcacggctcctgcgggaggaggtcatcctggagcgactcctcacctggcagggagaccccgaacccactgtgcgctggttgggcctgctgggcctgggccacctcgcgctgaatcgcaggaaggtgtgagagaaggggaggggtggagaggggcttggcccggtcgcggcgaggtctgcaagaggctgaccccgagtcccagcaggtgcggcacgtgagcacgctgctgccggcgctcctgggcgcactgggcgaaggcgacgcgcggctcgtgggtgcagcgctgggcgccctgaggaggctcctgctgcggccccgggcgcctgtgcggctcctgagcgcggagctgggaccgcgcctccctccgctactggacgacgtgagcaaacgccccgcctccgggtcccgcccctgccgc

SEQ ID NO: 10883 - DNA, 1713 bp, Homo sapiens
  source 1..1713: mol_type = unassigned DNA
cggtagcgaattaagctgcgcaggcgccttgcttccccctccatcaacatgttcgattggcctacgattgattacatcattggtccgcgcaaccctagcaggcttctgggcctgtagctgagccgaagctcttccttttgcgtagcggggcggggcacgatggtggcggggggggaggggggaattgttctactacgcatgcgcaccggggatggcgacagggcctctttctttgcttctctccacagctcttcccagccggggggctgagtgccctcccccttctctccctgcccctcccctttctcccccctcaccgcccagcggggcttctaactgacagttgtcgccgggccccgtccgtgcaccgcctccttctgcccgtgtcccccgcaggtagaggggggcgggagggggtgtgagggagaggaggagccggagccgccgctgcggccccctccggggaggggagaggagaacccccttcctcctcgccccctcccagccccccgctggcccgggagggggtggggcgccgaggccgcggcgacccggcagggcctggccggtgaagagcaggcgggcggggtgcggaggggtgaggccggcgagggccgtgcgcgcgccgccgccgggggggaggggagaggagggcacctaggctctcctcttctctcccccctcctcgcgcgccatgtaaccccgccccgccggcggtgagctcaagacccccgcgcgcaccgagccgagccggcggctgaggagagccaggcccgatgtggcgggggctacgcgccgcggccgagccgtgaggaagcggctcgcgctcacgcgtcccccagcacctcgagcggctgttccacaccgcccagcctaggcctgccggggcatgagtgtgcccgggacgccgggagcgatggagccggctggggaggaagagcggccgccaccggcggccgaaggagaggacgacgaggaggaggtggcagcggcggcccagacctcagggccggcccacggaaggagtgcctcctcgctggaggacgcggacgatcaggaggaagagatggaggcgatggtgatcggaggcggttgctgcaaggagcaggagctgacctacgagctacagcagggctaccgcatcctgggcgagttcctgcaggagaagcaccggggcctcaccgccccctttctgcagcccttggggggcgttgccaccgcggaggaggaggtggcggaagggccgcgcagcgggggccggggcggtcgcgccttcccgcagcagcccggacagggcatgtgtctgctgcagatggaagagaagttcgccagcggccagtacgggggcatcaccgagttcgtggcggacttcaggttgatgctggagacgtgctaccgcctgcacggagtggaccactggatctccaaacagggccagaagctggagatgatgctggagcagaagttagcgcttctctctcggtaagcgagcccggtccccggtgggactgacagactgacacaaacacacactcacacgtgcccgaggatgggctgggccaggggcctgggggcggcgctgataggtgctgagtcggtgctggagaagcccgggaggaggagcggcgctgggcggggaccggaggggtgtggtgggtgtgggccgaacccggcttgcgcgtagactgagaaggaaacccgagtctgcagcgc

SEQ ID NO: 10884 - DNA, 699 bp, Homo sapiens
  source 1..699: mol_type = unassigned DNA
cgcgcgaaccgctttaccctggatccctggaatcgtgcctaggcacccgggcggcggggtccgcccaggccgcgtcaggcagctctgggccggtgggtgccgggtctcccctcctcccgccccatctggcgcgcccgcagcgccgccgccgccgccgcttctctccccagcgggcgctcggagcatcccgcgccgcgttctccccgccccggcccccgcccgccggagcggggcccacgccgctggcagccatcaagtggctcgttaaggaaatgcaggtgagtgcgtgaggccgagcggcagctgctggagacgtggggtgtgtgcctgtgagtgcgagcgagacgaggagggagcgccagcgagcgagcgagcgagtgcgggagcggccgcctcggctccccgcccagccgcgcccgcagccggcggccggagcgcgtgggggcagcgcctcgccccgacagagcctcgcctcctccttgccgtctcggctgcttctccgaggagccgggagccgctcatcggcctccccaaccctgcgctcccctcccagcccgagtcctcccgctgctctttctcctcctcctcccgagcctcctcccctccggcgcggcgccgccagccagcctcggcggggagagtgcaggtactttgccttcagaataattagcaggacccaagccggctttccgagcgcgc

SEQ ID NO: 10885 - DNA, 1191 bp, Homo sapiens
  source 1..1191: mol_type = unassigned DNA
cggagcgggcgaggacggctagttcctgcagtgcccaggcctgcacggaagcgccctggcacaactcagctgaggatacacgctttttcccgcgcagccggagggctgaacagcaaagcactccccgggggaactgtgtgtcagcgcagcctggagagagcaggcccagggggcagctccaccacaggagacaggacacgcctcagtctgggcaaattcccggcctcctttggctctaagccagcagccgccgcccgcgacctcctctcctcctccgtcgtcaccccggccgccctgccagccccgaacttgcccgcgcctggccgcgcggcccctcagcccacggggctggcggcgcggttgggatgggaccgatgtggcgcatgcgtggtggcgccactaggcgcgggagttgctgcggcggggacggtgctgcggacggccgagggccaggccgctccggccgggctcgtggtgggggcagccccagcggcggcggcggcggcgtgggctggcgaggccgcgcggacggcgcccgacagcagctggaggagcggtttgccgacctggcggcgagccacttggaggccatccgtgcgcgggacgagtgggaccggcagaacgcgcggctgcgtcaggagaacgcccggctgcggctcgagaaccggcggctgaagcgcgagaaccgcagcctcttccgtcaggctttgcggctccccggcgaaggcggcaacgggacgcccgcggaggcacgccgggtccctgaagaggccagcacgaaccggagggctagagacagcggccgagaggacgagccgggcagccccagggccctgagggcccgacttgagaagctggaagccatgtaccgccgggccctgctgcagctgcacctcgagcagcggggaccacgtccgagcggggacaaggaggagcagcctctacaggaacccgactccggcctccgctcccgggactcggagccctctgggccctggctgtagccgaggccgcagccggtgagaggcggagcctcgagcgggcccctcctcctccgttcccagctacccccgacctcgcgcacgccctggcccgctccctgcccgcggataccttggactacggtgccttcccgcccccaccagtggacacttccgggtggcgcttggccatccgcttggtggaggtcga

SEQ ID NO: 10886 - DNA, 536 bp, Homo sapiens
  source 1..536: mol_type = unassigned DNA
cggacgggatgtaaagtttgggtgagacggtcaccggacgtccactggaagggtgcggggacctctacgccgacaccccgcctccccgcctcagtccgcgcactcaccgcgcacgcagagcagtgacatggccgaggatcgggcaagcctctgccgcgccccagccgcgccggaccgctccctctttcctctcagcaggtgccgcgactgctctcgttaccggccccacgggtctggcagctcctcatggtcccggtcgcaggtagcgtcccgccgctgcctcggacccgccccaaatctcaccgtctgagcgaactccgggtagcggtgagtaccggccggcaggctggggactgggcgcggcacagcgacgccatcgctgggaggtaggagctgccgggactccctcccgtcattccacccgggatccgcgcgagcgcctgggcggagccaacccgtggtgccccgccccccagccaattaactcacgcccagtccaccgaccccgcccccccccgcgagcacgtaggaggcgg

SEQ ID NO: 10887 - DNA, 728 bp, Homo sapiens
  source 1..728: mol_type = unassigned DNA
cggccaacacggccaggcctcccgggcgccccaaggcctcgtcaactctggcaaaggcggtgctgaggtgaaccacgtggatctgaaaaggacacgagggtaggagagggccacgtctctggccccgctccgccccgctcctttgccccttctcggccagctccgcgctcacctcggcagggaaacggtggccttccacagtgtgctccgagcccggacgacctgcagccccccagtgcagatgcagctgcagagcccggtactcccgcccgggacccagagccatctctagcccaggaggcagggtcagttgcactgcgtagggagaggcaagtgagccggccccgcccggtagggccagcccaacccccgggcaggcactgccgcgacggttcccttccctgcgccccgccccatccccaagtctcggcggggagaccccctcaccactgtggccattgttgcgcaggcgcagttctgggagcggcgggagctggaagcccaggagttccagggggcgcagggccgggcagaaggcggcgagctgggggcggatatccaccggggactggaagcggcccgcgcaggctggggacacccggggccagggcgggtcgcctggggtgggagagtatagtgaggaagtctgacgcctaggtcaggaacttagggaacccgggtagaaaaggtgagggggtgggacggtgggcggcgggtgggacgcccgg

SEQ ID NO: 10888 - DNA, 1431 bp, Homo sapiens
  source 1..1431: mol_type = unassigned DNA
cgagccacgttgcctttctgggagctcatcgccgaaatcaaagccacccctcgccgggagcaggcaaaaggatgaggggaaagaaaaccaacgaactactcccaggaattgacgcttctgtcaatgacccggaagaaacaaacgcagcctttccgccccggctctgggtcagcccacgtgactcttctgggaggtcaaagagcatcgctctgccctccctgctgttaagccaagccactccacgcggcgcagcctcgacccctccggctccgcgcagcctctttctcaaacccggagaacaagtcccactttcttcgaaatgagaattcccccattggcccgaatgtgtagtccatcaaatcaaaggggcggggaacctttgttcctattggttcttcttttccgcaatccccgcctcctgctgagcgagctcagcctctccttgagctcagagcgcctcccaccctgccgggcggcctctgattggtggaagtgaggcaaggctgggctccgtctctccccccgcccgctagtaggctggagccggggtcagctttggcaccttcctccagtcagtggccaactcctggctcagtggggattgtgctcgtcccctccgttcccctccagtcttcctcccgctaccggaacgagcctcgcgcttggcaggctgaggaggagcaaagaaagcaggattaaagagaaggaagacctggctaggtctgggtggcgtctgcagtgccagaaagggaggcggtggcggcggcggctgcgaccacggccgcgcgggacgtgaggcccgagagcaaccgacgggcagcggcggccgctccagcgccccgcaccggggccgttagtcagcagaacgcgagctcttgtggaggagcagggccggcgcgaggcgagactcgggagcgtgagcggggcccctggggcgccgccgtccttcttcgccccggcgccgggggctgtagccctggtccccgctcctctgtcgggccagtctgcaggcggagagagtcggacggcgcccggagcgcggatctcgccttgtggaggacagcgcgtcggctgcggttctctctcgaccccttctgcccggcgcttcggcccgggccgctcaggtgcaggtgcgtgcggcctcggggtttggggacgccgcagcccggctcggggagggggcgctaggccgggagccgcagcgcgggagggacgagcccgggccggcggggggaggggagcgggaagcgtctttgttgttggcgaccgggatcccttctcggcacaggggaaaggcggggaagccactcctcatcgggtctgtgtttttgagaggattctctgatggttgcgtgaaggggagcggtaggacagtccctgcggtccgtggagcggccggagtcagggggtgggggagggaggaccgaccga

SEQ ID NO: 10889 - DNA, 588 bp, Homo sapiens
  source 1..588: mol_type = unassigned DNA
cgacctactttgcgagctcgggtgggagtcccaggcctgtaggggccgcgtggcgccaccttccgatcgcgatctccaatggcgagtccgtgcggcccccagtgcgccgctccctcctgcgggccggtggggtctgcgagaatccggggctgggggcgggtctggtagtggcgggcggggacctcgggtcgggaccgagaagcgcctccgaacggcagttatactggggctgctcagtggcctgagctcctccctgccccctccccacattcctttgttctggcgcggggggtcctcgcggcgccgaggccccgctgcgccgcccacccggagggaggagggtctctgggaggcgccgcgtgggggcgcggcccgtggagcccgggcgctagggaccggccggggccggcgtacgggtgcgctctgggttcgcccgggccgcgggagccagggagccagggagccagggaccccggctcccgcacggggcagacaggggcagcgcgggcgacccggagcgcctgcgtctccgcggccctccttccaacagggcaaatccaggggcctgactccgcgcctgttctgcgg

SEQ ID NO: 10890 - DNA, 1203 bp, Homo sapiens
  source 1..1203: mol_type = unassigned DNA
cgcttctctgaagtccgcctcccagcggcctggagcccggggcgtggtcggctcgaatctgctccccaggcccagaacggagcccgcagcccgtaacccgctgtggccgcagcgggtcgcgcccttcgtccccgcctcaggagcggccgaggatctgcccagctgcgggcgccaagccctggccgcactcctttccccggcggagggagccggctggcgctgcggccttcaaggcgcgcggacgtcgcggagggcagccagtcgcgcgggagcgggtagcgcgcgcgagggcgttgggcgccgccgcgaggcggggaagcgcggggccgcggcggtgcgggttctagggcggcggccgtcgccgtcgcagcagcgccccgagcggggagggccgaggaggcccgacgagctggggatggagagtaccgggcccctcactgcctcagagcgcgtgtgcggctctgggcgcgcacagtgacggtgacggcacccctggcccggcagcgccgaggccgcttcgccagacagccagcggccggcggcaggccgggccatgagcggcaggggccgggccgggcctcgctgaccctggctccgcgcggcagcttccccagtttccgctccggtctctcggcatgagagtccgcccgggcccggggctgcggctgccccagacccgccgcacgctggcgcgctccgggcccgcggagccgcggtgctgatacctgcgccgcactgcgccgcccgcccgtccgctgtgtgccccgggggcgcggccatggaggtggtgggtgacttcgagtacagcaagagggatctcgtgggacacggggccttcgccgtggtcttccgggggcggcaccgccaggtgagcgccggccggggcgaggccgggccccgggcggcaggcacggggctaggtggttctgaaacttggcgcagccgcgagccgagacccccgactcggctagccgcccgggtatgctattgtgcgcgcagcccgtctcgccgtttgttttggtcctgtgagggttgttgtgaggcccaagcctctggcagcgctccgcctaccgaccggctgctgctgatcctcctgtgtgcccggggcccaccccgcggtccgcccgcaggagcgtttgcacccaggttaccctggacccaaaatagacggtactgcaccgtgcagactcgagggttgggcgt

SEQ ID NO: 10891 - DNA, 5370 bp, Homo sapiens; identical to SEQ ID NO: 5724
  source 1..5370: mol_type = unassigned DNA

SEQ ID NO: 10892 - DNA, 1691 bp, Homo sapiens
  source 1..1691: mol_type = unassigned DNA
cgagaataaacgtcagtccctacctttgtggaacgtccaacgcagctggctgggggaacacgaggccttgcagggagcgagccccggccccggtctgacggaacacaggcgacgcacgtgaagtccaggccctatcccagcgcaggcgggcctccagcgacccacagttgtcacatatccggccagcgccgactcccgaaggcgcactccccatactccactccgagcaccggtcccatcgttagggaaggtccccctggatagcaaggccggggcccaggatctgcgagacccaccccacccgccccgtcagagcccaggagcagcaacaggtctgcgctctccccgggcggcgctctgcagaccctcgacgggccaagggtgcccccagcccagccgtgcgctcaggccggggagatgggcggaggactggggctcccgacttccttgacagtttctgcgcgtcagaaactgagcagacacggggcccgcgccacctcgcccgccgcttgccccactccgcgaggctgcgcttccacccgggtccgggagggccggcccgcgtcccgggtatgaatggggctcttctccccaacagcggggaaatcccgccaccgccctccaccccggtccccggagcccgcggtggcgcaggtttgcccagcaagcccctgaatcggcagacaaaggggcaccggaggaaaagccgagcgcttccctaaacttaccggccacttccccctccccaaaacaaaggagccccccgccgacctccgtctctccccgcaaggcgcgccggcacttcggggagcggccacctcggggtattgttcaggctcctgggagcgcgccgcaccccagtccgagcgccgcggggacagttggcgacctgcacctacaggagttccaggggcgggtggagcgttcgggcgccccgagccgccggccggaccctggagggtcagcgcgggacccgcctccccgcagaagtttgcggaccccgcgcccggcccgccgagccctgcgcactcacctcgtcgcgagcagcgcaacttgtggcggcgccgcgcgcccggccgcgctccgaacctccctccagccggcagcctccgagtcccggccgtgcggcggccgaagagggcccggcgccccggagcagccgcgcgccgcccccgggccgcccccgccccgccgccgccgagtcccggagagagcgcgggcgctggaaagtttcggtggcgaatggcggcctgagggcgctgcggcggcggcggggcgggggcgctggcggctcctcgctcccaagcgcggagtgggggcgctgaggcgggcgcggcggcggcggcggcggcagcgggagagggcgggacagcgggagggactggcacggacagtgacctccacggggagctgccgcgagcgcgcggaccccagccaggaggaccgccaggggtccgcccccgccgccggcccctccctcacggccgtgggaggggacccggcgtaccacccggccccgcccctgcgccccgggggagccgcgtcccgaaccagcccctcccctacgagggtagggactccggccctgcccctcccccgcggctcctagtggggacccgcgtcccaacccagcccctgtcccacggtcgggggaccagcgtccctaccaagcccgccccgctcccccacgc

SEQ ID NO: 10893 - DNA, 1223 bp, Homo sapiens
  source 1..1223: mol_type = unassigned DNA
cggaatgccacctgccccgactgccctcgggtggctacaggcgcgggggaaggcgcagggccaggggcgctgagggtgaaacggtcccggcgtccgggcggcggcggtggccgcctgcggcagctcagctgaaacgcagcggaaactgcagccagtcacggggctgcgggaggcaaggcaggaaggtggcgctgccgccgagcgcctggagcccgagcgctcatcatggcggcaagggcaatggccgccacggggagcgagcacgcccctccgcgcgcacacgccgccgcgccgggcctccggggcccgtcaccggcgccgctgccgccgccgcccgctctcccaccccccctcacgggctgtagcggaattttctctccagacaccgcctccaagatggcggctccccctcccggcaaccccctctatcgtcccctgcagcaggcgccgagccgccgccatcttgtcccccgtccctccccccccctcaccgatatttacatagcgaaaatcggcccggccggcctgcggccttcacctcacgcctgcagccttcgcctcctcgccaggcctcaccccggcgcggtgccccaggtcggccgcggagccgacccggggcccctcgaccgcctccggcacaaccgggcgaccctcccccaacccccgcccgcttacggagcgcgcctccgccgccgctcggggcagccgggctcctccccgggcctaactgcggcctcctcggggcctgctcggcgccgcgcgccacgccgcccggcctagcgcgggagggcgccttgcgggccgccgaccaggccgagaccaggccgctgtgcgcgcactaggccccgcggccgcggcggcacccgggactcaccggacggacgtgcgggcggccggcgacggtggcgggtgctgcaggccggcctttctctggagcactgggccgggctccggctggtggggcgggcggagggagggaggaggggccgagctcggagctgacaaaaagcggcccagctccccggcacgggcccgccgtcagcacgtcacgtcaccgcccgggagagagacccaggaaaatgcggaagggtagacaggccccctcctccgcccggtgggtcctcctggcaccccgtgtcggcgccgctcccgccccgcgaccggggagcccagtggcctcgctgcggcggggtctccggcggccggagtctccgtgacagcgc

SEQ ID NO: 10894 - DNA, 1103 bp, Homo sapiens
  source 1..1103: mol_type = unassigned DNA
cgaggcacgcaccaggggggacctcgcactcgcagtccctcgtcccgcaccccgcagcccgggacggcccctggcccccggcctcagcgaggccgccgaagccgcagtacccagccctggaaggccaggcagccgggaccgcagggaccagccccgagcggcggcggcggcggggcagaagggcagccgctcccccgggacccaggacgccggcgggcgggaggcacacacgcgcgcacaagcggaaagaaagcgggcttactgcgtggggatgctcgcccgcgcagctgtctcggcggcggcggccgctgcctgcaccgaggccgaggcgcggcggtggcggcggcggctgcggactgagccccctccgccgggcggtggatgtagggcgcgggaggggcgcgaggggaggggtgcgcgcctgggaggcggggagggaaagaggggaggaagcaggagcgcgggggcgggcgcggctagccaggggcggggcggggcgcgcgcggggccgggctctgcccactgcacggaggctgtgtgcggggcgcgcgcgcgggagacggccggacgggcgtggggagaggggcggcttgccacgcaccccgcgcgcccacgtgcccccgccactggagagggccgggcacgcggagagggtggctgcggggacgcggtggcaggctctttcccgaggaccggctcggatccgaagaccgggaggagggcgggccgggggcgcctcgggccccctccctcgcgcagcggtccttagaggcctgcgggagtcacgaatcactgcaggcggctggggctggggaggtgggagcaacaaagacagccaagtgagggtggcgtctcgcctcaccggggtcctcgctaacctgcgcactccctgaaaagcggccccgcttcggggcccacgccgtttcggcctccgacttcggaacccggtggcttgcagcggcgccgaaaggcccaccgacgacccctccccttagtagcaagccggagggagctaaataagccccatccataatcccagtgccaccatccagagcgttttaacgtcactcagaaagcaccgatggcaaagcggcgcgtggcgt

SEQ ID NO: 10895 - DNA, 616 bp, Homo sapiens
  source 1..616: mol_type = unassigned DNA
cgcatccaatggcgactcgacagccctacctggcaccggtgcccggctcgtggggcgggtggagggtcgggcagtcgcagggcgcgggctccctcgggtggacggcgcccggccgggccgggccgggccggggaggcaggcgcggggcgcggggcgcggtgcacagcggggagcgcgcagggaggcgaggaggcgcggactgggctccgcccgcaggagaacaaacaggttttctccggccgcccggagcctcgcccctcgcccctcccctcggccggccccttcctctgcccctcctggggtaggtagaggcgcctggcacattccgcacattctcccgccagcgtcctccgcccgcccgccccttctcggccccgccccgcggggctgctggagaaatcaagtctggggctccccttgtcgagcacggggcgagctccagaaggctctgccgtgatggaaaacttccaggcaaattcctccgggcccgtggcccccaggccgggaagcctccgccacgtgaagggcccccgctcctagttgcgcgatctggccccggcacagggccaacgacttccacagatgctgtcgggttaattcagtcgagaactaccgt

SEQ ID NO: 10896 - DNA, 206 bp, Homo sapiens
  source 1..206: mol_type = unassigned DNA
cgccaaaggcgacgtgccggccgccagctccaggccgagccccgagcgcctgcaggaacacgccccttcacccggcgcgggacgcagagctgcgagagaatcttgttcagcgcggactcaacgccagggcgccgcctagaggttggtctctgtctcggcctcacccgccgggagaccacagagctgcttccccagccgcccgccgc

SEQ ID NO: 10897 - DNA, 1141 bp, Homo sapiens
  source 1..1141: mol_type = unassigned DNA
cgtactaactggcgtgtgcaggcgctgctgcttcgcgctgcgcacggagaagcgccccgaatccaccgcacgatgcggagccaggggcagcgagtgagcggcggcctccagccctcccctgccttctccttgccccttttgggaatggcagggggtttcctatgacaaatgcccgcaaacaggacagggttcggacgaccccagagccggcgccttctccctacactctcagccctagggccggacccgcccccgcggctgccatcgcccctgcctcgggcgccccgcggggaccaccccgccaggtgagcgcctccaggagcctctctgaaactcacctgcgtgaagtacaagttcatcagcgtgagggtgaaaaactgcaggcacacagggaagcagtagagcagccagaagacgaaggggctgagcgaattggccgccacgaagtctttgaagtagaaggagaagaggacggtccgcagggaggcccagaagaggcagagaaagaggaagacgctctggtagctgagccgcttgtggcggtaacgcagcaccagccagagctgcacgtagatgaacacgaagagcagcgcgtagaacacggtgtagacgacggtgaggccaagcttcacgtaggggggcacggccggggtcagcgtgggcggcagcgagtcgttgcgggctgggtcccacggcggggtctccatcgggccgggggcgctgccgcgcggccggggacgctcgggcctcatcggggctcacggccgccgccgcccccgcgggggtctccgcgcatcgcgctcagcctgcagccccgagactggaggaaagaaaacaagccgcacttcctcccccggcaccacatgattcactgggacggcctttgtctgcgattggcagcgccgcgcccgccgcccccgcgcgccgaccggccccgcgcgcccccgccccggcccgcgcgcccccgccccggcccgcgcgccccggcccgccctcccccgggcaccgcgcgccttcgccccgcgaaccccggcccgccctatcctcgccaccgcgcgctcccgcagtgcgcgcccccagagccgcacgcctcctcccggccccctccccatccccggggccgcgcgctcccagactgcgg

SEQ ID NO: 10898 - DNA, 1819 bp, Homo sapiens
  source 1..1819: mol_type = unassigned DNA
cgcggacgcaggacgcagagccccagcaccggcagtcaagaggacgcaggaaagcgcacgcactcacaggctcagagacgcggacgccagacccaggcttggacagagcagccccgcaagtcccaacacactttgtaaaccccgaagacaggagagagccaaaatactctccctgcccgcacgcaggccccttctgtcccccacggcccgattctgggaggcggatgaggatatccccaggcctggatgggggccatgggacatcccactctagaccctgccacgacctgggctgtgtccgttcggtgctcccggcccacgggctgcacaacttggcggccccgaaactggcgtgggggaggggagggctgtccacccgagcaggacgcggctgtccactcagtcggaggtgaggaacgacctccctatcccgttgccgggtccaagcggggcccgagagccgccggggagagccaaagggaggggaccgatggatttcccagagtgaaactgtgcgtcctggagagttccgaggcagcctcgcgagccctcgaggaggtcgctgtcgcttggcaaacacaaacaacaataaaaggaaggaaacccaggcggcagtgcgcagaacgagcacagggtcctgtgagggcgcgcagggtctacgcgggtgcccctaacagggtcccccacgtaggcggcgcgggcacggggccgggggcgcgcggcgctctcagcgggagggcgcctggattaggggtcccgtctcccctcagcgcactcccgtctcccctcagcgcacccccgtcccgcgccaggcccacccgcagggtcctctccagcacgtccgcggccgcagcagccagcccagcacccaccttcgaagtccgaaatgatcccatccagctgcgcgttgaccgcggggtccgacatgatggctggtgggcagcgggtcgcgcggagggcagcggcgaggaagcgcccccggcggggcccgggccctgcgcgctggctggggcgccgcgcccgcgctcctgcagtgcagagctagccgccggaggagcccctaggccccctggctcagctgaatgaatgggggaggaaggcgggcgccggcccctccccgcgcgctgcgcccccgccccgcccccgcctcccgggcggatcaggttcccgcacccgcaccggcctccctgtctcgcactggctgctccgcccgcctgtcaaggccaggcctggggggctggggcccgagtggccgctgggggacagtcctgggcacacgaccggagcgcccccctcctccccgcctggcccgcgcccaggggacggcgagagacgcggcctcagcccctccccccgggcgccccgctgcggccagatgtgggcggatgtggaggccgggccatggcgaggagggcgggcgcccagaggggaagagattcctccccttccccgggcgcagggtccttctgcaggaggctgtatttgggcagccaaacaaagttctctgtcaccgccgccgcgcgctctgcgcctgcaagggttaaacggcagcgcacgcggctggcaggcaggatcccggcctgtgggctcaagagccgaggggcgcagggcgaacatgcgagtcccatggcaccagcgagaggccaccaactcccacccaccgagggcacccctgcagctaacacccccaccacgaccaccgccccgggggccaccgctgcaccctcctgggtgagccctggagaaggcactgtccgggagaaggggcacagggcggggatggaacacggctgtcagagaagccagggacgggcgacgc

SEQ ID NO: 10899 - DNA, 1813 bp, Homo sapiens
  source 1..1813: mol_type = unassigned DNA
cgagtccactccaccaacgccaaacccgccagccccgccagccggctgcaggaccgagggagggtgcaaaaggcggggggcggagggggggtagatcagattaggcgaaactcaataagctcccagccctccagcccaaagcttccaccatcgccgccaccaacgagccactccaattgagccagcatcgccgcccacccgccggcccgccggaatcgcgcccatctcctgcaacctcgcccggaccggcatcccgccccctcggcccggtctcccccttcccgccgggtgcaaagtcaaagacccagcaaggcgacgtgaacttttgcatgcagggcacacacgtcgcccccggttccgggagtgcgggggcccgcggcgcggagggaggctgggcgcccgggctcccgggccaaggtcgccgcgcgtgctcacccatgtcccggcggctccggctccgctggccccggcgctcgctcagatcccggctcccgtcgctcgcccgagcccccaaaggtgctgctgcggcaactccatggcgatgagcatctgtcaaacggcgagccgcgagctggccgccctagctcggggggcgccggggcccccgggcgcgcggaggcggcggcgagcggcgggcgccccggccggccccgcgcttcccgcccgactctgccgcctccgccgcgccaccgatttatggagagagatatcaagggggaaaatggcgtctccggagcccgaggagtcctggagtaatcacattcacacacacacgcccgcacgcacacacactcgcacacactggcacacaggcgcgcggcgagccctgctaattttagcaggagccaaaaaaaattttatatatatatatatatatatatatatatatatatccccgtctctccgatcaatgctttttctttttttgcttttttttttttttttttttttttttttgcttttcttcaaaggatgggttggagcgttaaaaaatgttggtgggtttgggctcgcaggaggcggcgcgcggagggcgagggcgcttttgctgagctgtgcagttcggtccgctgagcccggcggccctgcccgcccgctcgtccgcccgcggtcgctagtgttgccgccgccgccgccgccgccgccgctgctgctccatggccgcgcccgccccgcgcccccgccgcgtcccgtcgccgcccgcccgcgtccccggtgagcgctggagtggggtcgggcccgtgtgcctgcctcccgcgccctctccgaatcccggactcctagtgaaaggaagggggagggcgcgggcgcggaagggaggtggatcggagcggcagcgcggcccagccgaacgggtaccgaccgtcaccccgcgatcttcctcgcagggggcgccggcgcccaagctgctcgcccggagggcccagagccgcttcccagaccagagccgggggaggcgcagccagtagcgagccctgagcgacctctctccccactcgcccccctgccccagtgaatttctgtcagttgaagggagcggggctcttgcccggggaaaaggaaaacagttcgtggcctgggatctgggaccccttgccgcccccagcgcccctcccgctccccggcgcccttgcggcccagtggctcctgcgcgccggagtccgccgcgaagactgagcggccgcggggatcgccgcgggctccgcgcgtattcctgggctcaacactgccactatctgacacaacaggagcagtgtcgggggggtactgcgcgcccagacgtgagctgtgataggctctcgaaactgggcgc

SEQ ID NO: 10900 - DNA, 1872 bp, Homo sapiens
  source 1..1872: mol_type = unassigned DNA
cgtggacagaaagcacgcgcaaggggttccggggacaggaagccaccagcctggggagcgggaggcactggacatttccccgccccgcggtcggtacgggtgcgcgtgcggcagcggcggcaggggctccccgccctgcccggggtccccggtcgtgccccgccgcccgggccgcgctcggggttgattcgtaccaccttgcaaggaagtgaacgcttcgcacgggaaggggaggcgcctgcgccggccgccgcgcagctccggggacgcccggggctgccgccggctcggggccgcagacgaccgcgggacgcgcgagtcccccgtccccccttgcccgccgtcccccccgccacccttgcccgagaggagtcaaatccggcttttagagctcggggagggtggggatatccggtgcctctcccgcgccaggaggaagggggagggcggagaggatccttggccagtctgcgccgagcagattcaaaccaaaacaaaaagattaaaggagcagcggccggggcggcagcggtccccaggccgggacacccggggtggtgcgcccgggttcgcgggggctgcgccggcgccggggaggcggggggagcgggagcgggcgacgcggggaaggggggagccagggggagggcgccggccggaggaggggcggacccgcccgccctagccgagcagagcacagccgagccgagcggcccgggcgggggccgaccccggccagcgtcggcgcagagagcgggcggaggcgcaggccatgctgcggctggtgcccaccggggcccgggccatcgtggacatgtcgtacgcccgccacttcctggacttccagggctccgccattccccaagccatgcagaagctggtggtgacccggctgagccccaacttccgcgaggccgtcaccctgagccgggactgcccggtgccgctccccggggacggagacctcctcgtccggaaccggtgagcccggcgccccccaaccccacgcccccgttctcgccccgggctcgcgccgcgccgcgccgctcccgcagtccccagcccgcccgcgtgcccacactccggcgcgcgctcgggcgcacagcctgagtttgcgagatcccgggaagttgaacccgccgccatctggcgaaggcgaatgtgatgtgactgttgctggtgtgaatatccgatgccaccgaacgtcctcataactgagggttattttaatttgggattcccctcccctcctccagccctccctcctccccctcccgctcccgaaataaaaccgacgggacccagaaggggaggctccccgccgggccgcccgcgcgcacccacagttcctgcgttgacataatctttagggtggagcgggagcagcctggacgcaaactgcgacgtttaggtaaacgtgcttcggaggaaggaggctgggacccggctggctttccctgttccctccaggttggcagccgcctcgcagtggcggagcctgtcgttggatgtgtgggtgtgcacctcgccggtgttgtctgcgtgctgtcagtgcagtgtgactgttgtctgtcccctgagtgttaacgaccgccgcgtggcgcgtgtcccgggcagctgggccagggtcggggtgggggcatggctgcctttgccggcacgttttgcagacattcaggtgacaccgggttgttgcgagaccttctggcttttccattccccgcgctccccaccgtcgtgtttccgcctcactcatctttagtaactggcgaagcaacagggaggaaacggacctcactctttatcggagccatgcccgcttaggtctttgctccgtgggtccctggctgcccgacttgactggcaaggcgc

SEQ ID NO: 10901 - DNA, 652 bp, Homo sapiens
  source 1..652: mol_type = unassigned DNA
cgctttcccggtggagacggcgacgtggcccacacgcgagcccctcgccgaggatgaatcaccagccagctcgagttgccacactttatctcagtacagttatcgcgagagtcccggggccgcgccggcgtgctctacgcacgcgcagtctttcgcggggccggccagtggtgccgtcgaggcggggggagtggccgccgcgccggccgagtgaggtagggtcacacgcaggcgcactcgcgcgccgacagctcgtgcaccgtgtggtagcggctgtgcgcgtccaggaaggacacctcgtcctcgtaggccgtcgggcggcagcagggctgcgcgcgcacccgctcccgccgcaggcgccgccgctggcgcagtcgtcgcagcccgaggtcgtagacgcgcgcggcagcctcgcaggcgcctgcgcagtagcggaacagcaccgtctcgtcggacgcgtagcccaggcccagctcgctcacgcgcacctccagctcgcgcagcccgcaaggccgcgcccccaaccgcgcacgcgcgcgccgccgccggggccccgcccgacggcgcggacctgggggccgcccagcccagggcgtcagctcgcgcagctccatcgcatccggggccccctgcaggagtgcacggtctgcga

SEQ ID NO: 10902 - DNA, 722 bp, Homo sapiens
  source 1..722: mol_type = unassigned DNA
cgcctcccgcagcggtgcagcgcggccgcatcccgcactcgctgcctggtgccgtggccgcctcctcgggcagccccccgggctcggcgctggcggcagtggcgagcggcggagacctcttcccggggcagccggtgtccgaactgatcgcgcagctgctgcgcgctgagccctaccctgcggcggccggacgcttcggcgcagggggcggcgcggcgggcgcggtgctgggcatcgacaacgtgtgcgagctggcggcgcggctgctcttcagcaccgtggagtgggcgcgccacgcgcccttcttccccgagctgccggtggccgaccaggtggcgctgctgcgcctgagctggagcgagctcttcgtgctgaacgcggcgcaggcggcgctgcccctgcacacggcgccgctactggccgccgccggcctccacgccgcgcctatggccgccgagcgcgccgtggctttcatggaccaggtgcgcgccttccaggagcaggtggacaagctgggccgcctgcaggtcgactcggccgagtatggctgcctcaaggccatcgcgctcttcacgcccggtgagccacgctccgaagagggccgcgggatggggggacccaagggaggttaggaggagggcggcctggacccagactccggcccccatagcgccccgctcgctccctaggcctggggccctgcacgcgccgtgagtgaacgc

SEQ ID NO: 10903 - DNA, 858 bp, Homo sapiens
  source 1..858: mol_type = unassigned DNA
cgcccgactcaggctccgagttctcccctcgaccctccccagcctaaaggctgtacccgcttcaggccttcccagcccggccctccagttccttcttcggcctccctcagcctggggtccgggtttcctcctcggctgagcagccgggtccgcgactcccttcaccctccccggcccgggcttccggttctttccagaggtgaggcaggggccacctagaattccgcggccccccacctcccccaagaccaccctcgccccagcttcctgttccccattctgtcctcccaacctgggttcccgattactgcctcgacttcaccttgccgtcagggaccaccagccgcctcttccgcgcctaggggacgcgcagcggcagcctctgctgatggcaagggtctgcgcacccggaaactccagggtctggggcgtggtgcggcccctgcggccagcgggctccgcttgagcttcagggctctttcgttgttggactacgtttcccacaggcctcagggccgcggatgaacttcgacctttgcttccttttccggtgttgtggttattgagttaagcctggcgagtcgaggtgacccgggccgggctgcgggaggagctcgcggtgaggtggccccgcgctgccgggcgaggtcggtccacgtggagccgggagcctgaggcctctgtacgcgggagctgcggacgatggtggttagtgctattgtttacgacgtcattgtggtgtgtgtgtgtgagagacggagaccctagtgtgtgccgtgggtgctgtttgatcggactcaggacggtgagtaggggcggggtctatcgtgtgaccctggtctacggtgacgtgatcgt

SEQ ID NO: 10904 - DNA, 598 bp, Homo sapiens
  source 1..598: mol_type = unassigned DNA
cggagacacggccacacgagtaaccccagcgacgctttctccgcgcgtgtccgctccggcatcccggacactcctaccttgacagaggtgcagttcagggtccaagatctggctcccgggttccaagcccaatttcgggttcgccagcccagcaggtgcggagccaagctcctccacagacgcggccctctccccacgcgaggcctccaaatctcgcaaactaacggaaatgaagctacgctccgggagcggtgcctctgggaaatgtagtccagcgctccggacgccgtgcctctgggaaatgtagtccagcgcttggctagccggccagaacgccaggaggcccgggccgctcacccctcgaggggctcgtgggctcggcctgtggaacctgcttgtcccgcctgcagcgccccggaggtttctgggagtgcccgcccgcccgcgctcagtgcgcaggcgtcagacgctcagggcctgcgagagcgagctgagtggtcccagggtctacccctggcaggagagagggtgggacccgccggccaggcaggtgcgggggaggagctggggccggtgcggggacccgccggaacctcgg

SEQ ID NO: 10905 - DNA, 1281 bp, Homo sapiens
  source 1..1281: mol_type = unassigned DNA
cgcggtgccggcgcgccagcagcccgcggccaaggccacctgctcccagggccccggcacctctgcggggaggcggcaggcagaggacgcgcgcgcagtcgcgcaggagccctcaggcgagtgggggaagcatcgcaagagacgcggacctggagcgcggtcactgcgttaccgcagcgacctgggttacctaagccggcgggactgagaggccgctgcgcgtgggcaggggctcagattgcgcccgcggtgcctgtcccggcccccaccccggaacgattgcagccctgcggggctcgccgcccacaccgcgctgaggacgctgcccaagccaggcgcccgcccccgcccgcggtctcagccgctcgcagcgcgccgcccccagacgcgcgtggctgctggcgagggctgagaccgcgctcccgccggccagttcccagcagcagcgcatcctccctgctccgcgccttcgctccggacccgcgtcgtcgcagccccgcggtgatgagccccgagccggtcccgccgccgccgccgccccagtgtcctggctgcgaccgcgcggagccgatcgcccagcgcttagaggagggcgacgaggccttccgcgcgggcgactacgagatggcagccgagctctttcgctccatgctagccgggctggcgcagccggaccgcggcctgtgcctgaggctgggggacgcgctggcccgcgccggccgcctccccgaagccctgggcgcgttccgcggcgccgcgcggctcggggcgctgcggccggaggagctggaagagctggcgggcggcctggtgcgcgccgtgggcctgcgcgaccggccgctgtccgcggagaacccgggcggcgagcccgaggcgcccggcgagggagggccggccccggagccccgcgcgccccgcgacctgctcggctgcccgcgctgccggcggctgctgcataagccggtgacgctgccctgcgggctcacagtctgcaagcgctgcgtggagccagggcccgcgcggccgcaggtgcggcgcgtgaacgtggtgctgagcggcctgctggagaagtgcttcccggccgagtgccggctgcgcaggctggcaggccaggcgcggagcctgcagcgccagcagcagccggaggccgcgctgctcaggtgcgaccaggccctggagctgggtgagtcggctgcggggcgggtccgcctcccctacacctgtccggcccagcagcggggtggggagctggccggtgggcccgaggctttgggctttcga

SEQ ID NO: 10906 - DNA, 1788 bp, Homo sapiens
  source 1..1788: mol_type = unassigned DNA
cgatgcagcccggagagagcaccgcccgcgcagcgacgcgcacagaccctcccttggagacgcgctccccggcgcgtgcggccgagcccgcgtgaaatgcacagaccctccggtgaggctctgcccacgtgtgaccctgagcactgcgaagcccttcccttccatcctcgcgtggccacccaaagtcttgcctacacctcgtacgtgcagatgccaattccatagaaatacatgatgtaaggacagaaatgggaacgactggaggctgatcttctcgtgaccacgtctcgccaacgcggtgcgcccatgcacacggcgagtaaacgcacacagccggtaaacagccatccccaccatgctcagcccacagtcacgcgtggggagaaggcagcggagagggcggcggtggcaggagaagtgggaagtcgcgcgcccgcgtgggctgctccctgacagcccggcgctgccccctccccctcccgggaacggcgcccacccgggggtcgcaggcccacgcgtcgggcgcgctcgggggggctccgcagcgccgagaacgggacaatgaggacgcggtgacaggctgggtttctgccgcggtagtggcggcggcggcagctggagctgcccgtgcagcccctgccgcggccacctccaccctcgcctccccggtccccacttacgttccgagggtctctttgaactcgaagatcttcttgatgtcttcagcttgctttttccaggaggagctgctctcgccgttctcccgggccatggccgacgagcgcggcgcggaggagcggccgggggcgcgctggggagggggcgccgggggcgcggcgcgggcgcagaggcggcggggatgccgggcggctcgggctgcggcgcagcttcctcctctgcagtttcctctttcgctctcgccgccgccgccgcggccgcggtccctccctggctcttatttctgctgttctcgggcacagacttcctgccgccgccgcgcgccggctcctttgccgccgcctgccagcctcactttctgctactttcttgcctccctcccgctccctccctgccgcccgccgcgctcccccccacctcgcgcctcctccccctcctccccctcctccccctcccgcgggctccccgccctctccgtgcgccccggccgctccccgcctccagcgcgccgccttcggggatgtcccgctcccctcccaagagcgccgggccacggccgtcgtgccccctggagccccggcgagggcgggtacgggcccccggcaggtgcggggcgcacgcgggagagccccagcccctccgggagctggaaacggagcccagtctgggggcgccggggctttcccgtctccggcgggagggggcgcctctgcgtggctcggaagcgccgggcgggcgggggtgcgcggcggccggatgcggggcgccgagggcggggcgccttcccgcgctgtggcctgtggcccgggggacccgaggggcaaggcgtggggtggggggggtgggggccggttgttatggcgacgggcggcggcggcggctgggatggaggcggaggcgggcgggagctcattcgcattgcaccaaatcggtttcacgtcagtttcgggacagacccgcgaggagcaagccggggagcctctgggcgggtacgcgcaggacgcgccagcagctgcctcgtggtccctttgcgagcaaaactcccgggggtgtttggcagccgcgcgggcgccctggtgctgggctggagcggccggcgggcctggccgg

SEQ ID NO: 10907 - DNA, 626 bp, Homo sapiens
  source 1..626: mol_type = unassigned DNA
cgtgaggacctccccggcaccgcctcgcgcgggtccctgccccgtgcccaggcggaggcggggtggccactgtccttccttcccgctccgcgccctcggcggcttccccgcggccccctgcgccgcgccccctccaggaggcgtcctgaccccgcactccggcctttcacctcccgaccgtcagcctcagggccgccgcggcgacgcgcgaccccttccctctgaggggcgcgggctccggacgcgccgggctctgccaggcatctagtggagggtcggaggtcggcgaccagcccgagcccagccgtcccgggagctggcgcgagtgtcgccacgaccctccctgtcccttgcgctcgcgctgcccggccgccgggcggccgcctcagcccccttatatagccctctaaaaatagctcgcctcgcaccgccttgtaaggcagcagggagatccgcagcgtgccaatccgcgcccgccgccagggccaagccccgccccaggctctgctccgggctccccattggtcctcagtgacttcatgagccccctgtttaccttacatggtcacacgcggcctaatggacgccctcctcgagatcccacggctgcgcggagaaccgaacgg

SEQ ID NO: 10908 - DNA, 1037 bp, Homo sapiens
  source 1..1037: mol_type = unassigned DNA
cgggcctgacttccgcgtcccgctagcaacagtcccccttgatttggtccaaggtctcggctctgccgcccctaaaaccgtccgtaaggtccagccgcccgtcgggcttctccgctgccctccaagtttctcccaactacttgttccagaccgcgttacctgcaacctgctccgggctggcgccatactcggcgtcccggcgcttctcacaagtgccctcgcccatgaccagcgcctgcaggggcagctcggagcccgggtggggatagcagcgcagcccctggccgcagcgcggggtgtagacgccgcacgcctcgccctccagccgggcgcacaccgagcagcagccgcagcccggctcccggacgagctccgcgcatggcatgcgggcgcctccggccactgcggccaccgcggcgggcggcgcaaccggcgggggcccgcaggcggccaggcgctcgggtgtgcagggcgggcagcggaacagcacctccgcgcgcgccccgccgccgccgccactcgcgcccagtagcagcagcagcagcggcagcagcggcggcggcggcagcggcagcgcggggcagcccactctcggcagcatgctggcggtcggcagcgcggcgcggcgggcgagcgagcgagcgggcgggcgggcaggtggcacggccctgcgagcgcgggagccgcctcctccgcttcttcctcctccctcgccgccgcagccgggtcctaaagggccggcttctccccgccccctgccttctcccctcccccttttggagaccactcccttcccccccgacactccctcgcgccggcaagtgagtgcgcgcacgcccgctcgcccacctccgcgttggctgcgggctctgggggttccctgctcttcccgggccccgtccctccgcactcttctggcctgactatgactcctgaaggagaatacggataactcgcgggtttgggtaggaccggcgtggcggtggagaagagcgcgtgcttttgtctgctctcagttcagttcgcgaggacttcgt

SEQ ID NO: 10909 - DNA, 977 bp, Homo sapiens
  source 1..977: mol_type = unassigned DNA
cggccctggcgctaatccgccggtttctggttccctggccctgtcatctctggcggggttgtgggccggtttaagattataagagggtcccggcgggaatcctcggtggtgctcgagggatccaggcaggccggcgattcccctccaacacaccccctgaagctaccgagacgctctgcacctgccgcgcctccagagcctgtcgtccccaggcctcagccctgaggctgcggtgacacctactgggcacctcgggccttgcacgcctcgcaggccggccgcaggcagtcggctctgctgccactcctccctcccggccgctggctggccctcctgccttggaggcacagagggaccgggcgctgaaaggtgtagtcctgtctgtggagggatggatacccggagctgaagacagcacaggagagaggggacctccacctaccagtgaaggcgccgccagggcgcttgcctccatgcctcctccagatttgtgataccgccgtgcggtccagatccccgggggcggctgtatgctagggagggagcacttcagggccctctgttcctaagggagagggacagcaccctcccgggcttccagctcccttgggtgtggcgggagagttctgggcgaggctgcgcctacacctgcacctcggccggctcctccggctgatttcgctctggttgatttcgcgcacattcctctcccagcgctgcaaggaccgcctgaactcgctggctatctcggtgatgaaccagtggcccggtgtgaagctgcgggtgaccgagggctgggacgaggacggccaccactcagaggagtccctgcattatgagggccgcgcggtggacatcaccacatcagaccgcgaccgcaataagtatggactgctggcgcgcttggcagtggaggccggctttgactgggtgtattacgagtcaaaggcccacgtgcattgctccgtcaagtccgg

SEQ ID NO: 10910 - DNA, 6206 bp, Homo sapiens
  source 1..6206: mol_type = unassigned DNA
cgtcacgccacaccgagagaagcggagacgacactttcacccggtgggggcgggggcgaggctcccccagcgcggactcgggttcggggagtgcagggcgcactctctttgtgggtctccaagcgaaggcacagttcgggggccggggtggagggcgcgctctagcaggccgggcgcacgggcacctgcaggaggatcacctgtctgttttcggatgggtggcacttgttgatgtgccgcgtaaggccgggcgagctgtagaaggtggccgggcagtacttgcaggggaacacctgggcggcgtgcagcaggcgcaggtggcgctcctgagcgcccttgctggcgaacgactctccgcacactgggcacaggtggcactcggcggacgcactcaggcccagcacgccggccccctcgccgtcgccggccgcctcctggggcgccttctcgtcgggcccggggtacaaggccagtaggtcctcggccgggggcgctagcggcgcgcccttggcctgcagcgcctggtggtgcgccagcaggtgcttgcgtaggtaggcctggcggcggaacttcttggcgcagtgatggcactcgtagagcccgtcctcggagcccgactcggacacgccgccggggctcggcgtgtcccggtcgctgccgccgccgggtgcctcccgcgcctcagccctggctgctgcttctggctccggcgcgcgggcggcggcgggcgcgggccgcggtttgtgccagcggcggtgcgaggccaggttggccgggcagctgaagaccttggcgcactcgggacagcggtactccacacgcacgatgcgcgagcatttgtgctgcgccagcgcgaacgggtcggcgtactcctccttgcacagctggcagatgaactcgcccagcggccgcgccgcgccccccgcgcggccccgcggcgcctccaccgggccctccttgatcttgagccccagcacgggcgacgtggtcacctcgtcctcgaagtgcagcttgcggatggccttgggcttcttggcgcccggggccttgactgccttggcgggcggctccgcggcggtagggggcgggggccgctttcccgggggccgcagggcggcggcagggggcagtggggggccggggcccgggccgcgggccgcctcggcgccagccgagaacgccgtgcccatcttgagctcggcgggcgcgaagagcagcgggtcgccgccgcaggtgccgcctccgccagctccgctcgcgccgccgccgccgccccctccgagcagcgcggcgggcgtggggaaggactcggccgagaccggcgagcccaggttgaagctgcgttcgaagtacttgtgcttctcgtgctcgcggctcacgggccgcgtgggactgtagagcggcgcggggtgcgcagcctcggggttgccgaagtgcgcggcccgcgggccctgcgggggtggctgcggcccaggcgcgcaggcaagcgcggcggcgagcgctgcatgggcgcgctccgcgggcggcggcggcggcagcggcccggggaccgggctcggcgccgggggctcggcgcgggcgcccccgcagctgggcgagagcagcagtgcgcggtcgccgtcctcgccgccgcggacccggtaggaaacgggcgtggacttcttgctgcgcttcaccaggaagccgcggggcatgttggcgcggcccgagggcacggcactggctcggtcccccctccgcgctcggccccggcggccctcagtgcccccggcccattgcccgggcgcggcggctgcgggactcgcgtggcgccggcgacggctcggcccagctctgcgccctgcacgcgcgtccctgtccccgggcccggcagccgctcccttttaacggggggagggggccattgttctcgcctcccgcttcccctggagccaatcagcgcgtccgcagctcctcagcctggcagggtgggagggcgatggggcggccaaaagggggccgggactcgggggtcgcccggtaggtgcggcagatgtacctgagggcgcggggcccccgcgcgcgcccctggtcgccccgcccggcgccgccgccccgcccggtccaggcacacgcccggccccgcctcccttcacggtctgctgcttctctatggggaggcgcacgtgcctgggctttgtgtctctcctccggggggcgcggagccgccaaatgggcccgtccatcagcgcgacaatgcacgcccccctcccgcgcggggattacccgcgggtcgctagcaaaatagcaacaaaggagaagaatggccccaaatatgtcaggagggttcaatccgcgagccggagccgagggggaagttgtgcgcgctgattgggtgggggcgggggcgcgccggggcggtgcgggggagatcgttgcggaggcgcagtggctccgcgtggtgtttgggaaataaacaagaatccgagagagcagcagggtccggacggcctccgcccggaccttggacggatgggccgctggacccaagaggccaagcaaaagggttccccggggttccaagtgtggacagggggcccggccttctggcagtggccgagggcgatgtttgtgctcgcagcctccgcgcgcccacggggctagagaaggtttctttcgagtttgagaaggaattggcacggccttctcagtctcccgaaagcgcgggattggagcgcgggcgggctgggctgggttcccagaggaacgtgaatttctgaacttttgggttcttggaggcttgggaatggcatctttggcggggcccgacccaggccgcccggagcttccgcgtggtccaaggctcggttaatccgggtcgagttggccgaagcccgaaacgcgcggtcggcctcgtgcgccccagtgaagttggctttctcctccccgcgcggcctcatgcattttcattccgagcgggcattttgtttgccggttgacatcagatgctaaatcaagggctccaatcaaggcgctgcgaaataaaggggctgcctgtctgggcgcagcccccacggagccgtgcccccttcacctttgtgaaggaaattaacctcctgctattgagctccggtcgcggccaatctggacgcaaaagagacgcgtgctggacggggggagggggggcaatctgtactctgaggcaggctgaggcctccgagaggacaagccgcctcccctgtgccaccaggaagagacaacagcgaagattccccccgcccccacccccacccccacctccgctgccgttccgtttggacccagactgggccgcctgcctccatcctctgtccagcccagccccgaggaaacacaaaaggcagaatcttcgggggacagggcagagaaccccacgagtgcgtagtggccctgatcgtccaacactggggaacaaatagccaagccacataaaatgtcatatgctgtgaggaaaatgtcactttattgaaagagaaggaaacatttttctgcaaagctttgtataccagacagattttgctgagttttacttacgcttaattccactgaaggtatttaattgttttggattttccctctgaaaataccctggcgtagaaattaaacatgtaaaaatagagtccacatgagtcataagttgtgatggggacagttgttaggcttaattaattaaggggttaatcaggttggttaatcaagggaaagatatttgataattttatgtttgtaatattttaactcacacactgaaaagggaagaatgcatatagtgaaatatattttgaaaagtctcaccctagttttaaaaatgctgtggtgagtgctagtctccccaaaagttagaaatcttaaaatgagtttatctaaaatttataaacatatttctatctaaaagtaactgatgttatttccttgctcttttgagctctgattaatagtgctgatgaaattagaagtgggaaaaggattccgagacagctttggccaattttattttctaatcacgaatcccatctggattgtagaatagcatagggcgggggctcggcctgccccattcggtcttgcatatgtaacactccttccattcaacagataacagagagttagtcaccttgtgaatcctttaaaaataacaacacccataattgtaaataagccgtggggatgggaaaccggcacctctaccaacaaaaaaaacaaaacaactcctgcgtgagtgaattcaaacagggctctgaatttagccaagggaatctattaaacgctactgagatactgagattcaatgaatccgtttctttttctttatttgtggcttccagtcttgctagcgtaaatgaaatctgctttcagacgggtacagtcaaaataaatggaaacttgaaaggtactagtattggaaactaatttcaccacccggggctggaaggagttaggctgcgcacgcgcgcacgcacacaccagcgacctccaagcaggtgtagcccagcccgggccgtggatcgcagccgccttctgcgtgattttctcagaacctgtgcacccgcatgcatggggacatcgggtcgagatatttgtcttcgcctgggaagagcaaagcgccatcacagtgcgcccccgacgccggccttggcgcacgcgattcggagaatgggccgcgtgaagttaagttgggggaaacagcgcggatttgcccccctccaggggggcttcgcgaaagtcagtgaacataaggatccaaggcagagcacccaaggggccttccccggcttcaggtgactcctccccttccttcggggtcctggccagcgctttggaaaaatcccgggcctcttcactttcccttgcggaccccgcggtgggttcttcctccgacgactgcggagcccgaggccccaggccctccaatttctcctatcctggtgtgcggggatgccgtcggggagcgcgccggggttcactctgaccctcaccacggctggaaatcaaagtcaaggcaacagggagtttgtagaaagcgcgaagcttggaaataagagcagaagcggggaacttctgcggaggagttggctccttggggtgtctaggagaacaggaggccctggcctcacgggaggagccgggcgggcccgcattctcaccccgcagagggtatcgcgtttggagacgtcggcgttgggggtgaggtgtcagcgcccctcatcaccactctgctgcagacttctcttctggcttcacagaagcccccactcccggccctcagtcccccgagccacaaccggcaggaaccgtgcgttaccgctgcagtgcccgccgcccggagggaccagcgcctccctgcgccgggtgcgcccgacccgagccggtgagaggctttgtatttgcaggaatgaggggttgttgtgtcagtcccaggggcacgcgagagacacgcgcagcccgcctggccgccaccccgcccggcccggccccaggcaccttccgggcctcccgcccgcgggccgttgcctttgttcggcgcattagcataaagctgccagggatctcccgtttagataattccacacaaaaggagagtgcatgaaagagagcgaacaagggacgatccgcgaggctgcgtcgtgcgtcctcgcggggagggaccgcgctcaagtatttccctcccctcgagtttcaagtgccccctggcaatctgctgcgcgcccattattcggccgggggccgacggcgtggctggccacctcttttatccccccgagagtaccgtcggggccactgcacgctccttgaagtgccctcagggctgtttgtttttgcctcagtgggaccgtcgggccagggagggaggagagcgggtaggaaggcccgggcgggcggcgggaagggcgacgtcggcgaaagctggcagaggcgaagcccagaaggtgagaaagtcataaccaaagaattaggtcagggagagtcaggacggcacgggacccatcgggatgacattgaccttggggcgcaagaggtgtcctccacctgtgaggtgctggcggccgctagtccgtgcgcctcggtctcaaacggaactgacaaaacccagcgaaactgaccagaaaggctgcggcgaccccgatcctttccccttcctcccaccccactcacacctgcaccccgcctcgcctgccgcaggaggacga

SEQ ID NO: 10911 - DNA, 574 bp, Homo sapiens
  source 1..574: mol_type = unassigned DNA
cgccagcgccaacgaatgtggggacagttcgtctggcgcccgcggtcgcatccccatcgggcagttccgtacccctcctccgggcttccaagccgctcgccccggctgcgggagaccccggcgaatcacatccgagaggggggcgcgtggggcggagccttcctcccactgtcctcccgccaccagccgcccctgtcgccgagcccgcagtcgccagcgcgccccgagcccctccaggccagaggctcccgcaggcgatggcggacaagagggcggggaccccagaagccgcggcgcgcccgccgcccggccttgcccgggagggggacgcgcgcacggtccccgcggcccgggcccgagaagctggggggcgcgggtccctccaccccgcagcgggccccgggaccgccttcccttcccctgggcgcggggaagcggcctccacggcgactactccgagcctggaaaatggccgggtccgggacgaagccccagaaacctgtggtgcagaggggctagggactcgggcaggagccagcgagaaggccgaggacgcgaacaaggaggagggcgc

SEQ ID NO: 10912 - DNA, 3438 bp, Homo sapiens
  source 1..3438: mol_type = unassigned DNA
cgtgcttgtcccgccctggccgcctgaggccggagccatacatagtctgcacagatccgagacacccggtcccgagtgatctggaaacgagtgtgctctcactgcgttcaaacaagacgaggacatttacaaggtgcgagtccccaacccccagctactggcaggggctgcgcagcggcaccgcccaggctctctctccaggcggccgactcatttctgcggagagcacgcttctcgaagagggttgtagacgcgctcttccagcatttaatttgccaccccacaagattgagttaagttttagttaaaatacactcattttattaaaaataggcggcccaataccacgccgtaccccagcctctccgagggcgcaagagaatagagagttttcagattaattggaggcaaatattttaccttctaacatttaaaaataatctaggcgcgtctgcaccggtgtggctcacgcgacccctacgcgcgaggtcagtcgggctggtccagcgcagacagcggccgggactcactcacccagtgcgcgcctctcctgcctttcgctgcgcgcgcccaaagctagaaagaagaaggtgacgcgggaggcgggtcgggtctccgggtccagcgaattcgcgatctatccggtttcggcgcctgagccgaggtctcagaaagaacccgttaattctagccatcctggatctgggtagggagggtgcgcggctcccaagcccagtctggatgcctagtgcggtgtgcttcggtctccccgtctgccctccggggaggtttctcacccggtggccctgggccgcttcactgtggcgcttccacttttggctaccggccttcctccgcccaggaccttccggcccagggagcagccgacgggcacccccgaacgctggggcacggaatttcaacggggcgaccagagcggagctcgcggctcgaggctcgcggctgagtacgaagacgggacccgaggacctgtacatcgctcgaggggaacctgtcctgggctctggtgcacacatagtatgcgttctgggctggcttgggttgggccaggtaggggagacctggctgggtacgaggcgccgtccaagccttccggccgtgggccgggcggtcgcggcgcctttgcgcacagtggccacttggggtcgcactttatgcctgtttgagcctctccgcggcgggctgacgccgggatctgcttaatcgttacaaaacgttcaaacaaaaacagggccggctccccagcagtggagagctactcggagcaccgtcccgggccggcctcggccccgaggctccgggggctcaggattccgtgcgtgtggcggggaagaggaattcagagcctttgggctgctgcttttcccgtcgccttcactgtgaacattgtgcggtggggtgaacgcggggagcggcggggccagtggagtcgaacctcagggctctgcgactgcacccgccaggaggggccctcgcttggcctgagaaaggtcccctgaggttaagagttgggtctgaacacaactctcggagcctcgagcccgccctccccaacatacaaatacgcgcagatctccagaaacaggaacgcacgacacacacggccagaagccgcgaggacacacagagcgtcgcccactgggcgggggccgcttgggaacaaagggcccaggaggcgttgtcccggcgctcattctgagcctccttgggggtgacacgggatgggggtggggtgcaaagggaactgagggaggagagtgcgcgaggaggggaaagcggtgatttggcctagaggtggggcgcgcactccaggcgagcgtgcgtgggccgggacctgcagggtacgggggtgggcccaggctggccgtcccactccgctccagcgctccgccaggcctccgccgctccggggccgctcgggccgccagtcagctgacgcggggggcgggggagctgtcaggcgcgccccgccctgcgccgctgggccgcggaggccgtgcagctattggcccgcgcaccgggccgcccgggcccccgcaccccagtgacatcaggaggcgataaaaggctgcggcgccgccggatccagcacagctgcaccgccgagctgcgagcggctgcgagcgagagagcgtaagagcaagagagctagagagcgagcaacgggcactcgccccacgcctcccctcagccccaccgcgcgctccgcttgcctctccaccccgcccgactctacccggcccggtccctgcgcgggcacagcccagagctctggggcggtgcaggcagcctcgggactctccggcgcgccgccgcgtccccagacaaaggcttggccggcggccccggcccgctgcgccctcgctccccgcctccccagctcttctccgctcttcccccccgcgcttggctcggcgcgctccggccggccgcaaagtttcccgggcggcagcggcggctgcgcctcgcttcagcgatggccgcggagctgagcatggggccagagctgcccaccagcccgctggccatggagtatgtcaacgacttcgacctgctcaagttcgacgtgaagaaggagccactggggcgcgcggagcgtccgggcaggccctgcacacgcctgcagccagccggctcggtgtcctccacaccgctcagcactccgtgtagctccgtgccctcgtcgcccagcttcagcccgaccgaacagaagacacacctcgaggatctgtactggatggcgagcaactaccagcagatgaaccccgaggcgctcaacctgacgcccgaggacgcggtggaagcgctcatcggctcgcacccagtgccacagccgctgcaaagcttcgacagctttcgcggcgctcaccaccaccaccatcaccaccaccctcacccgcaccacgcgtacccgggcgccggcgtggcccacgacgagctgggcccgcacgctcacccgcaccatcaccatcatcaccaagcgtcgccgccgccgtccagcgccgctagcccggcgcaacagctgcccactagccaccccgggcccgggccgcacgcgacggcctcggcgacggcggcgggcggcaacggcagcgtggaggaccgcttctccgacgaccagctcgtgtccatgtccgtgcgcgagctgaaccgccacctgcggggcttcaccaaggacgaggtgatccgcctgaagcagaagcggcggaccctgaagaaccggggctacgcccagtcttgcaggtataaacgcgtccagcagaagcaccacctggagaatgagaagacgcagctcattcagcaggtggagcagcttaagcaggaggtgtcccggctggcccgcgagagagacgcctacaaggtcaagtgcgagaaactcgccaactccggcttcagggaggcgggctccaccagcga

SEQ ID NO: 10913 - DNA, 4088 bp, Homo sapiens
  source 1..4088: mol_type = unassigned DNA
cggcccggcctggcccgggacacgtctgctccgcgcacacacagtcagtcggtcctgcccgaaacgcaccaagtcgcgcccagcggcaaccgccctccctcctcccctcgccgcccccctcccgactccggcgccacgactcccttgcgccccctcccccccactgcaccacctttaccgctccgatcctttccgaggggctgatgtcaccagcccccccactctcctcggccacttctccccgccaaagcctccctttggcgaggccccctccgccaccacggcgccccccagcgtcaccccctcctctcctcgcccctttcttcccctctttccctctcccaacaaatctcacaccccacggaggcgggtccccctccctctacccgccacccggtttcctgtccccgaaaccctctttttgtcgcagtctccggagccccatgggctccccctccccctccccaacacgcacccaaacccctggcgtcgtgtaggcctcgcggaaaaagagagaaagagagaaagagggggagagcgagagcgagagcaagagagagacactgagcgggcaggccgggggagggggacccgcgcccgcgtcgccacggccccccgccccgtttttgagcccccgcccggccgaatccgcgcccctgggtcccccttccggcctcgccccccacagacagagcccgcgaacgggcggggggctcgggagcgcgcgcccggggcggggggcgggctcggcgcgcgcggcctgcggggcgcccttcgagggcccccgggccggggccggcgccccccgcccgcccttacccagcagcagcaggcggtgcgtggcccggtagacctgcttgtccttctgcagctgcttctcgatctttttgttggcctcacgctgcgccttctcctcgttgcgctggtcctcggtcttactgttcccgaggcagcccatggcggcggcggcggcggcggggcgcggccgggctgcggcggcggcgggcgcgggcggcctcacgcgggccgggagggccggggcagcgccgggcgggcgggccgggcgcgggctcggctcctcggcaaggagcgcgcggggcggactgcgggccgcgggccgcggggcgcgcggacgggcgggaaggggagggtgtcggtcggaccgaggggcgcgcgcagctccccgcccctcgagccgaggccgagggggctgatggccgccgccgggccgaggcggaccagagcaggagctgcgggagctgctgccgccgctgccgccgccgccgctcttattgcctcggccgggcccccgccgccgccccgagccaaaagcgccgcggcgggcggggggaggcggggggaggaggaggcggcggcggcgaggggggtggaaggaggaggaggaggaggagggccgaggagcggccgcggcggcggcggcggctgggagggcgggagccggcggagggaggcggccccccgggagcccggggagggggtccctccgcccgcgcccggccggggacgggacgggccggggagacgccccccaccccccgggctcgggcagcagcccggctgagccgaggggggagagggggcgtctccgcgccagtgacgacccctcgcacgacgccaacgctccaccccccggaccgcgtcgcccggcgcccccgaggcctcctccccctcccgcgggcgccgccgaggggctggggtgggcggaaggggagggagcgcgcgcccggacttaggaaaattttcgaaagagcgagagacacagagagccagagagcaggagtgtggaaaaagcgaggcgagcacgaaccaaaggacagagcaaccgaaaaggaaaatgtgtccacacacacacacgaacacgaataaaaacccacactacacagcgatggtggtgtctggtggcggtggcggggtggggggtctgactagatgagccgctcctcgcgcccccggcgccgggcgccatggcccgagccgaaggcgcctctggccccggagcgcccgcggcctctgcgcttggcgcggccgcccaagtaggagaagaaggcgcagcccaggaacactcggaagcagcaggtcgccccgaacacgaagccgcagccgcggccctgctccgtgcgcttctgcagcaggaagttgagcacccacgaggggctgcgcaccgagaagaccaggaacaccacgaggggcaggtgggcgctcagcgcgccagccttgagcggcccgggccgccacacgatgcccccaacgcgcggcgccgcgtagtaggcgtcgtcctcgtcgctcgagtccgtgtcccagtcagcccaggccctactcgtgcccccggcggcggcgccctcctcggcgcccccgacggcgccctcctcggcgccctcgtcgtcgtcggcggcggccgcggcggcggcggcctcggggcatcgggcctcctcctgggcttctggcaccttcttcttcttcttcttcagcatcttctccatcttcttcctctccttctccttcttcttctcctcctttcgcctctgctccagcagcttcttctcgagcttcttgcgctccttgtctgttaggaacttttcggggagcgcctcccgcgccgggttcttggggttcttcgcgagcttctcggggtccccgctcttccgcggcgcgagcggctctctcggctcggccaacgccgcagccgccgccgcagcttcggcagccacctcggcagccgccgcggccgtcttcttctcgctctccgccgcccgggctttgagcttcatggccatcttcagcatggtggcccggccacctcggggagctcggctcgcgcctggcccgggctccctgcttgcccccggcctcgggctgcccggcccccgtgcgccccgtgtcggggggcttggctgcggttcccgccgcgctgccccggggccgcggagcgcggctgcccgggcttcgggctgctgggctggctgcctaagagttagcgccaaaaaggatgagcaaacgaaaaagggacaagaacaaaccaaaaagcacccaacaacagcgagaaaccaaaaagcaccaagaaatgtcaactcaaaaagaaaagtgcaaaggcgcggatggcaggagtctgtttaccctcaggcgctccttggtttggctcttgggcacgccaatggagaagagaaaagagagagaattggggggtgcccggaggcgccccggggcaaggcagcggcgcccgggcgcccctgccttgtcccggacccggcggctcttgcctgcgccgggcgactcgcacttccgcgggaggccccggcgctccccgacttacatgtgagtgaggtgcactcacacgcaaggcagcgcctgccggccgcccgccgccgccccgcgccgggacaggggctcgctccagccgccgcgccgcagcccggagccagagagcaggggagcgccgcgccggccagccacctgacgcagcccgctccgcggtgccgacgcgactgagtgtccccgccggggagcagagcttctaaccggccccgatgacgccccagcctcttcagaggaccgacccatagcagcggcccctataaaccgaaggggaagcgcgaaaaatcggcccaccggggacgcacccaaatgggccgccgcgcaccctgggggtgcaggccggtgccgggaccgcgcgggcgtgggccgggggcgcgggggccgcgatggcggggggcgcgggcgcgcccaaggcggtgggcgctcaaccccgcctcccagacctgcctcccaattttcggtgagtggtgtagccctgggcggcgtgcaaagtgtgcgacggcggcgcttacccctgctgtgcgcctccttacctccagccacccaccccgccctcccagcggcgcgcgcccgccgaggtaggtgtcagagagccgaattcgaattatttgcgacgcccggacggagtttcgtatcttcggacgagaaaagtgcgatgggagtgcaaagcctcccctgctcgaagcagcaggcgcgccggtgtcacgggagccgaggagcggtggccgtggctgtggagtcggtgctcgaggcgt

SEQ ID NO: 10914 - DNA, 522 bp, Homo sapiens
  source 1..522: mol_type = unassigned DNA
cgatacagcccccggcgcgccgggcactgaggccctggagcacagcgtggggggcctggcacagacacgactcacgaccgggccgatctccggccagaaagaactatgttccggccgcccgggtcgcgggcccgcggtgcatccctgcaggcctccatcctgcctcggcagaggtctgcaagaatcctgtgggtgtcccccggagcgggcagaggaggagcccagcgccgaggcccaggcgcgccccgccctcgcccctccccgtgcccctcccccgctgctcccctcccaaaggccgagacctggacgctgcccggtggcctcggcgggggccctgtccttggccgctgcctctctgaatcccaggtgagaagaataaaacgtcctgacgctgtccggcttccggttcttggagaggacgggccgtctctgccgagagaactgtgcggaatcaggaagcgctggtgctccttcgctttcacgggactaagcgaaatccggctttaaacgaagtaaagccgg

SEQ ID NO: 10915 - DNA, 2260 bp, Homo sapiens
  source 1..2260: mol_type = unassigned DNA
cggcatccgggccgaagcgcctggtccgcgtttccgcgcgggctcccctggaaccgtcccgggacacgcggccctctcgctgctggacttttccccgagccccagcttgccaggcagggactccctgggcgggcggcggggaagcgccgagtcggcggccgcccacacccctctccacgcagcacaaaggacactcgccggcaaactttcctcgcttctgacccgggccgagccgggaactcagcgccagctctgttcctggcggggctgaggcttccctcacattccaggccacctggcaaacgtcctgaggctgccactccttctgggctcaaggctcacgggctgaggtctgtccccgcgtggagctcaaggctcacgggctgaggtctgtccccgcgtggagctcaaggctcacgggctgaggtctgtccccgcgtggagctcaaggctcacgggctgaggtctgtccccgcgtggagctcaaggctcacgggctgaggtctgtccccgcgtggagctcaaggctcacgggctgaggtctgtccccgcgtggaccgccgagagttcggtagatccttcccaaggctctgacttcaatactttcagtgccttgtcaattataccccttgcccctttctcttaccaaggccaccgccaagacaccctttttctttcctctccccgtcgcccgccaccttccttgccctcctcttggccctctttccagctccctgggccccctttccgcgctgctctccagccccagctgccttccccggttcacatcccggcagccctcctccctccccgtccccgggcacctccctcccctggtcggcccctgaaatccagcaggctcggctccggtcactgcctttttttgcctgtttctatctggcctgccttcccaactatcgctctcccacacctttttttttttttttttggcaagggggacggggggaaacggggcactatattctcgtttcccgacttcgtcattttccccagctccgtgagccgcgccccctcgtccccctcaggcccgcgatcttaccctgaggttccccagaccccgtagggtctcccacgccaccaagtttgcctcgacttcccctcgctgcctcccacacctcctgccgcggcgcggccggccagggacttaccccgaggcccagctggtgggggtgttggggtgcgcgcggacccggcacccacggcggcggcggcggcagcagcagcaggaggaggagaaagacgaggaggaggaggaggactagctgagcggcgcctccttcccagcccgcagcgcgcactggctccttggggcacccccgggagagcaccaagaccggagactaggcggcgacacaggcaaccgctgctgcacggggctgggctcagtcggctctcagaggccagggcagggggaggcaggactgggaaggagggtcggagaagtggggtgcagagggcggggcagcgagcggccaggtccggaggaaggcgccccaggcgcctagggatgccgccgcccgggctgacgccgtcggcccctctccccgccaggcgggcgcttgcagccgcgggcgcacgggcctcgcctcgttcaccggctcgttgccggcgcccgcggtgcgccccgctttgtgctccccgcagccggcgtgcacctggtgtaagcaaaggcggtcagctgatgggccgcgcgcggattggctgctccgccgtctcctcccctcccgcccgaccctcttcgcggcctcccgcccccgccctcggcgcggccccgtgctgggcaccatctgtggaccgcccaacaaaggcgcagcgcggcggggctcgggtggccgggccgcggtcgccgctttttgtctaggggacggcaggctgcggctgggcagggaggcgaagcgcactgccggtttttagcaaaagacagaccaaaagaaaatacacgtccgtgctaggaggccagctaggcacaatggggccccatctctttgcggcgtagaactcgggctcgggggctgagaaccagacacagttcggcctggggctgtgggagccaagtttcggggtgaaatccgaccctgcgtcttaaaatacagggcgcgtcctcgggctgtgtgtgcgcgcccgggggcgtcctccgcagacctggcccgggccggtgtccctgccgcgggaaggaggattcggacgcttaactcagcggcgaagtcgcttcccattggaggaggctttccgaaaacgt

SEQ ID NO: 10916 - DNA, 1502 bp, Homo sapiens
  source 1..1502: mol_type = unassigned DNA
cgacggtgagcgtggagcagcccgcggtctcgctgcccccttcactcccggacccccagcctccccagagtggaggggcaagcacacagtaagtacttgatattcgcccgactcctgagctcctcatctgtaggagctagggggcttgttctccgtacgtcctttgttggagggaggaacgagggaaggagaaaacccacgctgaggccgttggccgatcactttctttacctcccggacaacattgatgggccccactaaggaaagccgaattctcgcatgcccgaggagtgtcggaggtggttgtgcgcctagtccctcctggtaaagggttcgaagcactcgtttattcaaaggcggccgagagccataccatttgcttgcatgacgggagacaccgaaacgccccttttgaacgcgatgacaaacacctcctcccactcagcagcgacgtgcacgtgacagtttttgggctctcgcaactacgtggaaacttggaataggtctgcggctgcacaccgcccggacgccggggttcctgcgtcccccgccccctctgatcgcggctgggtagccgagccgcaggcagctgggggcccccgaacgccgcctctgcatcgcgccgcccctgccccgggctccggtagctttcgggcttccgcactgcccgccgcgccctgcccacagggaagcgcttccccaggcggcggcggtcctggtgcggaccctccggccgcagccatgtgggacccgcgggcagctaggtgcgtagcggcgcgggaagcactggggcatctctggccttccgggcccgccacccttcctggcgggaggcggccgcgcgcggggactggcgaccctgaggtagcggccgaacgggcccgcccggccatccctgtggggcccacagccatctaggtgcagacccgagccagttgcgcggggtcggtcgcgggggacggcttcggccttttcggtccggagggaccagggcacgcgctgcgacaggactgcggcggcgcgcggcctgcctagctcccaccccggcatcgaagccgcagctctcgggcccacctccgcatcctcaggggttcccgggggctgccgacaggttcctgaccagcgagcgcgcccccggggcaagcattcttggcgggcagaaacctgggagcggagcacagcggtgcaagggaaccgtgccaggcgggaagggcggaatttgcggggaacttggagcgcgctggcctcttcccggcagtaggaggccttcttccctgcccgcccgattgagggctgctgggctggctcaaactggactgcacggtccatcagcctgggctcaccgagtctagggggaaggtagtagtagggacccaaggctgggaagcggagcccttagaagcccttgcttctgcctcggagcgtttccgaaccggagctcggagtctgttgcctgggaggcgcgttgcgtttcctcccaactccctgtctccgtcccgcgg

SEQ ID NO: 10917 - DNA, 510 bp, Homo sapiens
  source 1..510: mol_type = unassigned DNA
cgtcccttgtcgggagtcactcgtcagcttctcttctcagcccggctgcgcagcgctctcaacccaacccctggactcatcttcgccccagcctccttcgtgcccagcgtcccttgtaaatgacccccccggccgggtgccccgctttctctctcggcctcttccgcgtggtctgctctccgcccgcctgcgctcgcccggcctccctgcctctgcgccttcacctgaccgcaaaggcggccagggcagcctccgcgcggcctgacagtcacggctcccagtttgtccctggacgtgggaaactcgggctcatagcgcctctacgtacactgcggcacagactggcgtttcctacggcgccttcactggaaagcgcccctgtggtcctggggagagggcggctccatccgccacccttcccggagctgcccccgcccattctcatgggaggaaatcgcagggcgtgtgagcccccgacccctcgcccccacctcttccaggaccggccgc

SEQ ID NO: 10918 - DNA, 940 bp, Homo sapiens
  source 1..940: mol_type = unassigned DNA
cgggcaactgcccgggccttgcccacccctcccgcgggccgcacctgccaaggccgcaccgccagcgccccctgccgccctctctgcacagagacccgcgcccacccccgcacccgcacccgcacccgcacctgcccccaccccgcgctcgccccgcgccgaggccgcgcagcctgcgggcagtggcgggggcacgaggatgcgaatccaggcggggccgggagctgggcgcgtcccccagaacccccgccacggccaggcctgagcctcacctacctacgccgtatttctcctcctccgtgggggtccacatggccgtgccgggcgcggccccgcgggcgcggcgaccgggcgacaacgcggcggggacggccgcgggcccggctgtggcgcaccgcgagtcgaggcggggacggtcaggcggcgcggggcagtgggcggcgcatccctcacaggccgtccgggatgccgccgccacccccgccacgtctggaccgcgaggctccgcgggtggcccagcagcccctggcggcgcgggcgaaggctcgccacctgtccgtcgccgctgctcccgtgccgccgcttgcttcttcacagctccgccgcccggctcccggcgccgccgcggctcggctcgccccagcgggctcgcaggacgcccgcgcatgcgccactccctgccgcgcaggggctcgcgctgcccgggctcgcgccgtcccgagcccgcgcgcgaatccacgcgccgctgctgcgcgccagcggagggaaatccgcgagaagctattggactgcccggccccggaccggcttctagaatcgctggtccggggccctcagctgcagcaaaccccggagggggcgaagccggtcaggtgggcgactccctctacccggactccccactcgcttccgcttccagtgcctcctgcctgcgccccga

SEQ ID NO: 10919 - DNA, 2718 bp, Homo sapiens
  source 1..2718: mol_type = unassigned DNA
cgtccgggccgccccttctgcccagccccgagcgcggagctgtccaggattcccagacgggtgcgagtcactgcctgaagccccttctcctccgtcggaagaggatgtgcttaaaggatcgccggaaatcctggttgaagaccgtgtagatgaccgggttgagcgagctgttgcagtagccgatccagaagaagaacttgaagagcgggccgggcacctggcaggcctcgcggcagatgccgtacaggctgtagctgaagaagaaggggaaccagcagagcacgaacacgcccatgaccacagccagcacaaaggtgaagcgcttctcgcgcgcctgggccaccttgcggcggcacacgctgctgcgcgcccggcgccggcgcgacaggaagaactcgacggagcgcgagctggcgcgcgacaggcggccaccgggccccggggacctggaggcggtcagcgcccccgactcagccgcccccggccccgccccctgcccgtccgcaccgcccgcgcccccctccgcgcccgctcgccgccgcccgccccgccgcaacgcgccccggcgccgccgcctctcggccgctgcgctgctctcgtccggctccacgtcggcgggcgggggcgcgcagtgcccgttctcgcctgcgcctgccgccgcgcccagcccgttttcggtagtcggggacgcaccgtcggggcccacgggggcgcgcttctcgctgagcgtgcgcgtgcgcagcttggccactcggtagatgcgcgcgtagaccaggcccatgatgaggcagggcgcgaagaaggagccgatgcaggaggacaggatgtaccaggtctcgtcgttgaggccgcactgcgggtaggcggcgccgtcgggctggcggtagagcgagaccagcggcgggaaggagatgacggccgagatgagccacacggccacgatggtggccttgacgcggcgtggtgtgcgcttcaggttgtactcgacggcctgcgtcaccgaccagtagcggtccaggctgatggcacacagatgcacgatcgacgaggtgcaaaacagcacatcgagcgccaggtacacgccgcaccacacctgcccgaagtaccagtaggccatgagctcgttggccaacgagaagggcatgaccagcgtggccaccaggatgtcggccgaggccagcgacaccaggaagaggttctgtggcgcgcgcagcgcccggctggtcagcacggcgatcaccaccagcacgttgcccaccacggtgaagacgatgaggaagcccaccacggcagccagccctgccaccgcgcccgccgagtactggccgcgcggcggcccccaggaagcccccgaggcattggcaaccccgccgctgcccctctcgcccgcgccgctcgcattggggcccgccgctgccgccaccgccagcgccgccgccagcgccggggacgccatggtcctcccgcgagctacgccgtccctcctggagccggggcgcagccgcggcagctcgggcgccccccagccggggtcggcgcccgcatcgccgcctgctgctcgggcgcgcccgccggggaccgcggcgcccagcagccggccctcggccgtggtggctccgcgggcggcgcgccggagagcgtggctgccgggctccccgcagctgccgagcgtgtaagtgcagagcaggaggcgcccggagcgagcggcgacgcggctgcggggggaggggggcaggtcccggggtcctcgcgcggccccgccctcggcccggctcacggggagcgccccggcgtcgagcccacggcgacgcggcgcccgagcgggcgtgcctgagcggccccgcggtcccggagcccagccggggcgcaggcgacaggcggcggcggcccgggcgctccgcctcccatccggccggctagggctcggcgcgccggggcgccggccgccgctcctccgggcccccgcgcccgcgcgctccctccgtctccaactttactttcccgggcggggcgccggcgccgccgcgagtcctccggctgctcccgggcgcgggcgccccccgcggtccacgcttggccgtgcggccgccgcctcgctcgccggagctgcgccgccgccgccgccgccgccctgcgctgggcgcgagtgcggccgcctgcgatcggcttccaacttgggtcgagttgcgcagcggggcgggcgcgcggggcggggcgggccgcgggccctggggagctggccgggaaccggagcccgcggccgcctggtcgaacctgcccgcgcggcgccggggaggagtccggggcggcggcgcggggcgcgcgctcggcgagggcgccccctccagggccgcctgcagcctgcgggacggggccgagcggcggccggcctgggtggtgagttccagaagctgctctttctaagactggagcctccttcgcctcccccggcgcaggcatgggcgcaggcgggggcgcgcacacgcgcgcgcgcagcacgggcggctcggggtccatggcctgatggcagagcaacctctcgcagcctgggggaggacgcgacgctacctgcgtgcgcacaggtcctgccgagctcagggtccggaccagatcctggatcggcgctccccgtcagagccacctccgcacccaccccggcctcagttccctcggcccacttcccagcgctgctggagcatgaatcataactaacggcgg

SEQ ID NO: 10920 - DNA, 2661 bp, Homo sapiens
  source 1..2661: mol_type = unassigned DNA
cgcgggcaaagcgtgcctttcggtgggttataagcagcgcccggtccttccttctctcgccaagttgcctgatccttccctccaggcgcgcgcgcacacaccacactcacacaccccaaaaccaagactcgtcctacaggatctgggaaaagaaaaagaaaaaaaagccctcaatcaccacctccttctcgccgactccccctcaccccccgcctcccctccagcgggcagccaaggagagctagaggcgggggaggggagagggaggagaagcgacgcaagtgggtagcttttcagcgccggcgaggcgcgggaggaggagaagcagtggggaggcgcagccgctcacctgcggggcagggcgcggaggagggacccgggctgcgcgctctcgggccgaggaaccaggacgcgcccggagcctcgcacgcggccaagctcggggcgtcccctcccctcggccgggcgaactcaaggggcgcagctctttgctttgacagagctggccggcggaggcgtgcagagcggcgagccggcgagccaggctgagaaactcgagccgggaacaaagaggggtcggactgagtgtgtgtgtcggctcgagctccgggcagaggcatttgggcccgaggcccccgctgtgactccccgagactccgcagtgccctccactgcggagtccccgcgcttgccggcaaaaactttattcttggcaaacttctctttctcttcccctcctcctcggcccccatcttctgctcctcctccttctctagcagattaaatgagcctcgagaagaaaaaccgaagcgaaagggaagaaaataagaagatctaaaacggacatctccagcgtgggtggctcctttttctttttctttttttcccacccttcaggaagtggacgtttcgttatcttctgatccttgcaccttcttttggggcaaacggggcccttctgcccagatcccctctcttttctcggaaaacaaactactaagtcggcatccggggtaactacagtggagagggtttccgcggagacgcgccgccggaccctcctctgcactttggggaggcgtgctccctccagaaccggcgttctccgcgcgcaaatcccggcgacgcggggtcgcggggtggccgccggggcagcctcgtctagcgcgcgccgcgcagacgcccccggagtcgccagctaccgcagccctcgccgcccagtgcccttcggcctcgggggcgggcgcctgcgtcggtctccgcgaagcgggaaagcgcggcggccgccgggattcgggcgccgcggcagctgctccggctgccggccggcggccccgcgctcgcccgccccgcttccgcccgctgtcctgctgcacgaacccttccaactctcctttcctcccccacccttgagttacccctctgtctttcctgctgttgcgcgggtgctcccacagcggagcggagattacagagccgccgggatgccccaactctccggaggaggtggcggcggcgggggggacccggaactctgcgccacggacgagatgatccccttcaaggacgagggcgatcctcagaaggaaaagatcttcgccgagatcagtcatcccgaagaggaaggcgatttagctgacatcaagtcttccttggtgaacgagtctgaaatcatcccggccagcaacggacacgaggtgagcgggccgctgccccagttccgagaggcgtggcgggtccctgggaaactcagagagggaggaagggaacgaaggcgcccggccgcccggctgagggtcccgagtagatccctcgtttgttttggggtgtgtgcgtagctgggcccccggtccgcagtgtgtgtgtgtgtgtgtgtgtgtgtgtgtgtgtgtgtgtgtgtaggatgggaggtagaggggcagggtaacttattccaaatggatcagtttagggggttcggtggctgaacggttggttcgcgggcaggaacccacaatgtttcgccttcggtctttttgttgggctgaggggtgccgtgctttaaagcgagtagggctgaataacgctactgataaattcttccgtgggacggaaaacaaagtgcacacgctatctcttggtagatgtctctgcaaaagtgcgttaaaccaccaaaggcttaggtggagacgagcagagccacaggcgggaggaaggggaggcgggcgtgggctggggcaggcggggccgtccctaccaccggtgagccgggccgcggggagcaggccggccgatggggcgcgcacccgggctgcgggggcggtgcggggttcagtccctgcggccccagcgcctgggctagcagctgggagctgtgggtgcgccgagccgacccaccgcaagggtacaccctggctgtaccgcccccaactctagttttctccaaccgccatcacttggaaacaaacccacaacttttatttggggtttgggaccggatcaggccttaaatctacgcagaagaaaggcggagaagcagcggaagccgggcactagtcctgcagggtggaaggcgctttatcgggtcttctggcccgctgcgggcgatagagctggtaacctgagtagagtaaatagagacacgtgggtgctggctagagaaagcgcggagcagggccgcgc

SEQ ID NO: 10921 - DNA, 801 bp, Homo sapiens
  source 1..801: mol_type = unassigned DNA
cggttattaagcggctcccccgtgagccccgcccaatgcctgtgcgctcaaactagcagcgtccgaggaacgcgttaactgggagaagtgaactgagggggtccggcggccgctgaggaggggagcgcgcgggaggaggggcgaggagcccggaggcgggcgcggctggcagcttagagggcccgggcggaggcctgagagcagggctggaggggcggaggaccggggagacccgcccgcggcgttcccggccggttctgagcaggcgccgtggcagcgcccgcgccccctgcccgccctccgccgtcgccaggacgcaggctcgcgtcagggctggcggtagggcccgcagctgtcggcctggcgtcttcaccccgcgcagtcggcctcgcctagccttctcgcgcctgactggccggaccctgcccctggcggaggtaactgcccgcggattccttaccccgcgatcctggcctcctcgtaagctccccggacccgggcgtcctcggtctcccctcatctactcttctgtcgggcaggtccgcgaccttccgcctcccgggccgtctcccgccgcacccggccctggtacatccccactacccagtccgggcccgtcctcgctctgggcctaccccagcctcccagcgtcgcctgctgacggagcgcgggagccccaaggggccggggtcacccggccggcgtgggtggtgccaggctcgggccacacctcggcaccggacccgagtcccccagcttctcgagcaggatccggaggaatagaacgtcaattttcctcgc

SEQ ID NO: 10922 - DNA, 311 bp, Homo sapiens
  source 1..311: mol_type = unassigned DNA
cggctaacggtattacggaagtactagttggcacagaggctcggtgcaattaccgttctgcaccgtaaaacgggtttaggaagttcctaggagatactagcggtgccagaaccgagaaagtgacgacacagacaacttatggactccgcgtacgggaaacgttccgttgggcgctaagaacggtgcagcaactgaaaaaccgctcagtgggcgctactggcaaaagcgttgctgcaaaaccgccagctccgcattagaagcagagccgccagacagaacccgggacctgaaaccaccgaagcggagaccga

SEQ ID NO: 10923 - DNA, 1048 bp, Homo sapiens
  source 1..1048: mol_type = unassigned DNA
cgtcctcgcaaatctcccgggctccacgccctgcggctatcacgcctgacagagaaacaaccagcaccagcggctgacccggctgcccgggccctcgtgcaggcgggcgggagcggacaggccctggcacgcatgcgctcggggcgggactgcgccttaggcctgcgcgttgccgctagaccagcgggggggcggggcggcggcggacacgcgcctcaggcggcagccgcgcgagagggactttgtgttccgctgaccctcctcggggcgcttcctcccgtgccgcccttcccctcccccgccgcgtccttgcgaggcgcctcccattcggtgggaccgacccggggggatggagggggcacgcttctacaaccctcctgggaccccgaagagacgcccgcgtgcgacctgagacgccgccctcgccgagggcccatgggcgcgtccccacaggcgggcagtggacgtgagggcggcgagcggcggggccgcggcgtccaggagggccgcgctcgggctcggccccgcgcaggccgcgcgcgcgcgctcccgccgccgcccgggccgcgcccgccccgcctctaggcgccggccccggagcccggtccgcgagcagcggcggctgccggagggacgatgagctgcgcggggcgggcgggccctgcccggctcgccgcgctcgccctgctgacctgcagcctgtggccggcacgggcagacaacgcgagccaggagtactacacggcgctcatcaacgtgacggtgcaggagcccggccgcggcgccccgctcacgtttcgcatcgaccgcgggcgctacgggcttgactcccccaaggccgaggtccgcggccaggtgctggcgccgctgcccctccacggaggtgagtgccggcccgggggcggcgggcggtggtcgctgcatcccgcgtaggcggcgggactagggttcccggccccggctctggccctggctctcccgcgctgcccggccgacagccccagccagggtcgaggcttccgtcgtggacagcccggcctgctcccgt

SEQ ID NO: 10924 - DNA, 301 bp, Homo sapiens
  source 1..301: mol_type = unassigned DNA
cgggaagcagcaggcgcacggccgtctggatctccctggaggtgatggtcgagcgcttgttgtaatgcgccaggcgggaagcctcgccggcgatgcgctcgaagatgtcgttgacaaaggaattcatgatccccatggctttagaggagatgccggtgtcggggtggacctgtttcagcaccttgtacacgtatacggagtagctctccttgcggctgcgcttgcgcttcttgccgtccttcttctgcgccttggtcacggccttcttggagcccttcttcggggcgggagcggatttcgc

SEQ ID NO: 10925 - DNA, 1395 bp, Homo sapiens
  source 1..1395: mol_type = unassigned DNA
cggccctgtgaggcccacgcgggagcgcggaggctcctgggtctcagggcgccggcagatggcctgcagcgcaccgcccggcccccgcgctggccacgtccgccagcgtcatctctctcccccgcctcctacccctaaaaatccggcggtcgagtagctccgcatcccggagggctcccggtgcaaaactgagtgggaaagagaaaggggcggagagcgacgagagagggaaggtggggaagaagagcccggccgcccccggccttttccggcgagctctgagtttccagggctcatccgcccctccaagtcgaattacagaaactcctcattgccatgctaatgacgagaggggctgtggggagagggtttcgaagaccctcctggaagaagggaagtttcttttcttgccctcgtctccttcacgcccacccgagttcctcccagccagccctctgcgctcttccccctccattccgagcttgaagagccggtggcccagcctcgccctccaccacggttctatgcgctcctcacagccccacggtctcccagcccagcctcagaacagaggaggtggcctgggaacccggggcgcggtgtcagccggattccccgccttccggctgggcgcgctgcgggctgggccggcgtacttgcggccacccggcgagctctggcccactgattcccgccccgagagagccgggagccctcttcccttctcacctctcgccagttcatctttcattgaacggtggggagggggcgggagcgggggacgcctcccagcccccacctcccggaggcctggcggggcgggcagcggagtcgggcgcgcgcagaacgcagcttttgctcttcttcgctccagcactccaaatcggcctttgcagtcgccgcagcagctgccgccgcctaggctgcctgggggggcgactgcgcgtcacctagacggcggagcgccggggatttaaatgccactaaaacggtgatccatcactgcggaagccggcaaacttttgcaggaggctcagccattggctgacaccgtcacgtgcccctcctccagcgtcctccgccctcccgccccccctcttgcgcactgtacattcatatcatttttcttctccggccccatggaggaagtgagaaagttggcacagtcacgccgggcttcgcaggaccaggtcactcagtgacagatggacaatgcaagaatgaactccttcctggaataccccatacttagcagtggcgactcggggacctgctcagcccgagcctacccctcggaccataggattacaactttccagtcgtgcgcggtcagcgccaacagttgcggcggcgacgaccgcttcctagtgggcaggggggtgcagatcggttcgc

SEQ ID NO: 10926 - DNA, 766 bp, Homo sapiens
  source 1..766: mol_type = unassigned DNA
cgaccccgtcttatgtcggtcgcaccgtgtccctcccaggctccactagcacctgggctgctatggtgagatcaagatgggccccgcccacaactaacgatgttattccgcagcgagtcaaagccactccctaccctgggcccgctacgcgacctctgccggcctccgccccacgcggttttagtacggcgccaaggccccgcccacaaatcggccccgtcccctcgtgtccgggcccgccgctcatcagacgccgttccggcgcagcgagttgagggcacgcctaccctccctccgggtccccagtcctcaaggtcccagcacaatgccccaggaggaagactccaggccccttcctcacccgacgctgtttctgggcgagccgaggccccgcccacccgccggcccggctcccgctctcacctgacgctgttcttgtgcagcgagtctaggcccgcgcccgcagccgtgccaccctcggagctcgccttcttgtccaggttctggaagcgctcgcgggccgtcaagccacgctgcgagctctgcttaggaacgtccagccgcccgccgaagctcagcatccccgcggcggcgtcataggtgaacagcaccgggaagcagtcgtggccctgcgcggagggcgggggccattggagcgccgcggaggggaaaccgaggccggagggaaggccaggcgggcgtctggccgcccgggaggcagatgccagctcaaggatacagacgggccacagcgagggaggcccga

SEQ ID NO: 10927 - DNA, 691 bp, Homo sapiens
  source 1..691: mol_type = unassigned DNA
cggcgaccagcccccgcagaggcggggtccgagtccccagccagagccccaacaagcagtcgaagaacgcgggcagaggctccgacatggccaggagagcacgccgccgcccgtaggtgctcgggcctcgccgagaccgggaagaggtggcgccgccagcttttcccagacccaggggtggcccgacaggcctaaccccgctccccgccctgctcccccgtcccctcctccggcgacgcccggcccgcggttggccggcccgccgcgcgctccgggacgagggcgggaggcgagcgcgctggccgccgcgcactcaccattgtcaacgccgccgccgcgtcccccctactccactcctcttccctcaggagaactcccagccccggctccctccgctccggcgctccgtcacgtgacctcgggccgcccctcacacgtgaccgctcccttcctctcccccacccccgcacccgtccctctcccagcctcctgccccgccctgctggccgccaggcactccggggagaggccgcttggaggcggggcctcaggctccacccttcggagggtggagaggggcgggcaaattacgtcgagtgggcggggcctgaacagaggcgggttcgcgggctcctcctcgccgtctcttcggtcaccggacgagcggttccgtgtccggcctctttaccgc

SEQ ID NO: 10928 - DNA, 1024 bp, Homo sapiens
  source 1..1024: mol_type = unassigned DNA
cgcgcactcaccctgggctgtggagcccagctggccgccgcccgcctcggccacgcgctgcggccccacgggcccgggagcgagggcttcgcccgcgccggacatgggccgctccgccgagcccgcgccgcgccgctgccgcctagctcgccgcccggcagggcgcacggaggaagggctgtgaggtgctgggtgcagggaactgactgcttctggcggaaaaatatacaaaattaaaaaaaaaaatgtttttagagaagagcacaccacccctgcgggacgttccctccccctccacttccctccctcaaactccaccccggggaagttttgatttgaaacttgcgaagaaaactgttacagcgcaagttgacagcggcggggtcccaggggtccgaggtggacccagcggggaggggctggaaagagagatcgggtttgggagaaccccggggatggggatcaaacccctcctcttccccgcccggagaccactacctacctccgcatccccccgtagtcgctccaagccccttcctcctcctcctcctcctcttccgccccggaaagttagcgagcctccggcagcggccgcattttcgccccggtggcctgacgacggcggcggccgcccctgcgcgtcctcccgcctccctccggctcagcccagacgccgcagtggcggcaactgcggcagcggtggcggctctgactccgcgcactccgccccctctttccagccagctcactccagccggctcccctgcgagggggccttccccctctctgcctctctttcccctcttccactcctacaatcctgaaacacttctccctctgttgctctttttcatcacatccggatcgggaaggcctcgaactcttggctagcggccccgatgctgggagcggcgcgacccgggctcggccgcgcgatccctcgcgccctgcgctgtctgggtcaggaggccagagccggcctgggctggctcgggctccccacccgggcgctgcgccctcccgg

SEQ ID NO: 10929 - DNA, 1339 bp, Homo sapiens
  source 1..1339: mol_type = unassigned DNA
cgccgcgggtcttggcgagcaggtgatcacggatccctggtgtttgctgggcgagacggtgaagcaacctcctccccgccccctcccccgtctagaaaggtgcaagatccgctaaaccgtgcgttgcacagcggcggccggagcagacgcgggatggtcgcgcgtcccctgcacagcacagaggggcagccggagagcctgggaaaggtacgagcggggaatcagagcacagggtgcggaccagaaagagcagacggtcagtcgggcggggaaggaagttgccgagttgcaggtgtggaaggggctgccccaggcccacccttggcagacgagggggcggggagtcgcgccggggacgaggagactgcggaccgggcgcgctccttgcgcagtcgctcgcccgcgtgcccaagccccccgggaatggccctcgcccaggggcccagctcgccgccgctagccccgcagagcctgcagctgctggggcccggcagccgccagggggcgggagctgcgtcgcgaacaatggccgcgcttggtcgcgggccggcgggaggcggagtggaggtagagccggtgccgggcgcgcgcgccggccgggcgtgctggggcgcgggagcggctgcgcaggcgggggcgcgcggcgcgagcgcgggagggcgcggcgggagcgccggggaggcgggcggaggcgggcggaggcggggggcggggagcccgaggggtggaagccggcggcggccgagcggggtcagttctctgtagtgtttgccaatgttggagccgtctgcaaagtgtccccggcaagaaggtaaataccctcatcgggggcgtccgggagaccccgacttccgcgccgccggcgaagaaggcagagggcgctggggagccctgcagttccgcagcacggggaacccggagaaaagcagcccccttcgcggcctcccctcccccgcgccttccctcccacatcgggctctcggggcagcagcggggaggggagaccggcgggggagggaggacagggaggcgaaggaattggggtggggggtgcgtgtgtggtggagggggtgggacgacacaggtgtcctgaggggaggagccgggaggaaggcgaggaggccgggccaagtgggggtgcggaggtcggggagacaggaacgcggctgcgggcgcgggaggctggggttctagggggccggggtggtagcggccggaagagaggacggcgagtgcagccacggtgtggctgcgagggagagggagcgcctagagtagggcaggggagggcggcccggggagggtctgcgggaaatgggcctgggggcgctggaggcgg

SEQ ID NO: 10930 - DNA, 2273 bp, Homo sapiens
  source 1..2273: mol_type = unassigned DNA
cggcctccagggaccgaggggtccgcagagtgacccatcccatccccgggaagctgccgggagccccgcggacccgccgcggcctccagcctctatgtgcaggggcctcggggttggggcttggccagtgcgacgccccgcccgcggccacctacagttgttgaggaacagcagcaccgcgaagccgagcgtggcggtggccagcaggatcaggcaggcgttgcagggcaccatgaagcctcgcaccagcagggaggcgccaggcggctgccgggtgtcccgcgccagcggcagcggaggcatggcccggggctccggctctgcgccccactctcagagcgtgggggctcctcacggggtgcccttgggcctcttcagggctgctcgccccatcctgggacccctggggcggcggacagcagctgtgccctcagagttcacccagtcacagccctgggggtgccaggtcccggctccagtcctccaggctcatcgtgggaggagggcagaattctcccggagtagaaatcccaaatgtgggctccgaggtaggcggaggagggactgggagcccgcagccacccctgctgcccacagcctccccgggctggccgccagcgctcggtcttcccggagcccccggagccgcgcaggccggagaggcggtgcgcgcggcaggtgcgcgggggccgggcgccgagggtctgctgtccccgtccccggcagaggcggaagcggcgataggagcgggcaggcaggaggggcggccgcgtcgggagcgagaagaaagcgccgcctgcggaggccgcgccgggtcccgggctccctccagctcccctcgtccccgcggggctggggaggtgagtgaggggcgaagacgccgcggagggagggcgggagcagagacaaaggaagccgcctccagggaccccggcgtccgcggggagttccagaggatcgggcggatgcggacgggagagcgccgcacaaaagggaacgccgggcaggcggggccgggggtgctcggctggggctggggctggggctgggcccggggccgggagcgctggggctggggctgggccgggactggggctggggtggctgaggctggggccgagggtgggcctgaaggtgttgggactgggggtgggactggggctgggcctgggggcgctgaggctgaagctggggccgggggtgggactgggggcgctggggctgggccgggggtgggactgaggctgcgggcgttcaactgggattgagtcgagggcagcggtggggctgggccgggggagcaggggtcgcgccgggcagcgtcgcgtgctggagcggaggcgggtgcggccggggcaggtcgcgggaggaggaagcgcctggggagcaggagctgggccgggcgggtccgcgccccgcacccgcgggggtgaatcggagtcgccgcagggggctcggggggccgcgtgcgaccgcgtgtgcgcgtcgtcgtgcgtgtgcccgcgagtgtctgcgcccgcggccccgccctggcggggcgtaggtgggggagggccccaggtgcggcgcgagctggagggtggagtgaggtgagcggcccagaaatcgcctcgcccactttcccctggggattgacagtggctcctccagtcgccggcgcccccgactcccgcgcggggcggggtcatgcaaatgagccccatgcaaattgcggcggggactccctgcgggtccgtggggctggaacgcccccaagaggccgttccgggaacgtccgggccctgacgtcactgcggcccggggcggggaatgggggtctgggcccatctgggactcctgacgcgtagtccggcgtccccacacccgcccccgtaggtcgcccctctccctggccgctgcccagccgggggatccgggggtaagggaggggcccgtccggtccggtgtgtgcaccatcccctagagtccatgccaggcccgaccaccctggaggccagaatctctcggcgaccgcacctcagcgcccccgcacacccctggccacccgcagcctttggaagggacccctgcgcacccattaccctgccctctcctctgtccctgcaatgaccgaccccattccccaagccccagctccaggaaagcaaggacccggcgccagggcgcttctgctccgccagtcccctccagcaccgcggaccaagccatctgccacactcggtctcacccactctgcagacgacagctgccggcagccaccagtgccaccgcgt

SEQ ID NO: 10931 - DNA, 5586 bp, Homo sapiens
  source 1..5586: mol_type = unassigned DNA
cgggctcagccccgcacacggactcgccaggagtaggtggtcagcacgcgctgctggcggcgcaccacgcaggtgtaggtgccctcattgacggcgttggcgatgatgctcaggtgcgcctcgcccagggccaggtagccggggtaggagaactccaggggctcctggtccttgtaccagctgcaggggggcggggcgtctcctgcaggcacagccccccccgctgcctgccccgcacccctgccccaaggccgcccgcgggctgcccaccccgaggaccgcccggggcgctcactcactacactttccctttcttgtggaggatcttctggccgcagcggaaggtcacgttcctgccctcgggcaccagcctggttttggtcctggggggcggtggggtggtggccaccgtggggaaggggaattctgctccgggtgggggaaagagccccgtcagtgccccctcagccccgaccatggccaaggcccagctcccacgcagccctgtcccggccccgtgggcatcaccgtagcagaagtcgcagctgctggggcagagcctcttcatgagccgccggcgagcgtcgcagaagcccctccgcgcccaggacgcgcacacgaacagcctgtcgaggcatcctgtcgggagcgtggggagcacggcctggctcaggaccgcccggtccccgccctcccgcccgacaaagggactcaccgtagagccggtgcagcccccacagctcgtcctgggacaacgccttccagccgcgcagcgtggcgttcaggtgcatgagcgcccggccgtgttgtgagtgcatcaggcccagcgcgtggccgatctcgtgggccgccacgtgcaccaggtccgtgagccacacgcctgcgggccccgggggtcagcgcctgggagccccgggcccagccccgccgcccgtgggccagctccccgaggcccggtgtatctgctggagcgcagccgcggagccgccctcggccgcagccacggaaagataagaatgttctgggcccaggcggtgagctcggcccccaggaatgcagctccagctcccgctccagaggcgcagggggatgggaaagggagttcagggctgccgggatgggggctcccacgggctcccctccttgcctgctagactccagtggcagccaccaccccggaaggtccctcctgccgtctgccccaaagcccgaccgcggcagcccactgtgctgcagaggagaggcctccaggaggccagcctggacggtcacctttcttccagctgtagcgcgtggggcccaggacccagtactcgctgtcgtcgaagtggatgccgccgtgcggggggaagaaggcgtgggccagctcccccgtggggccgtcgaagcagtggtgcagcgcggagaccaggcagtccgtgtggttgatcgggtagaagcctggggggagcacggggctgagaggccgggcgcgcagggccgggccggggcgggggcgggcgcccacctatccggaggtcgctgggctgctcgggggccacctcgcggaagctgaagggggacacgtcgctccacatgcggaaggcggcagctagggcccgccgcgtctcccgcgggctcagcaggttccgcgggaaggagaggatcctgcagggagagtgagctcagcgggcgccggccgcgccccctcccccggggcccagccagggcgcacctgtaggtgaggttgaagtggtcccagcgcagcctggctggagtcagcgtgtagcggcgtctgcggggggccagtgggcccgggacccgggtgggggggaccgccgagaggcccagcgcagcgacgtctcccttcagggaagaaagcgtgcgtgggaggcatcggtgacggtccccaggaccaaaaactgccgcggaaaatggactggaaggaaacgggggtgggggtgcccagggctgggagcgggcgtggcgggtcctgtctgcctgtggtttcgggtctcctaacctgagcgccctgttgcacgtccctgggaacgcggcccagtggaggggaaggggctgaacagcagggcgaggcctcccacccctcccaacaactggacacaggggcgtccaaccctccgacctcgggacgcacatccggaccctcaaacaccccgcacaccccgcacacgtcctgcgggccccccgatagaccagacccacagacgtgaggacccccccaacccggcacctggcctcccccccgccgctcacctgcgctgcgctccaggccggcaccgccggggcccccagccgggccagcagcaccagcgcggggaggaggcacagggcgaccagcgcggctccaagccagcggcgctcgacgcctgcccccggggcctccgaggggacacgggccccgcggcccatggcagacttgctgtggggctcagggctgcatggggcagcaaggcgcgggggcccgggccgcagagcctccggggaggatccggaggggaggcagtggctcggcggctcgggttacagcccggtgtggtgggggggagggagacggggcgggagagggggcaaggctgcccctgaagggaaccagctggcccgtccgttggccgagctgcctgctgtctccagccgggggcatggggacccgcgtcccgtgggccaggggcagaggcctgggcatggcctgctgggcggggtcctcggaggggggagcgaagagggccccaggcagcccgggaagggcagcgccagggctcccgcttaggaaagggtagcagtgggggtccccaagcccccactgctgggcagtgagtgatctggtggcttttttcccaaatggaatcctcaaaaaacccctgagccccacatgagcggagtctccatcctggcccaggcagctgagctgggccgcaggagacgcgtcgctcgcctgacagtgtccccgagagctgggaggggatggccggatggggacgtggcagtgagtatggggcggtggagggggaggcggggagggggtgcgtgggtaggcaagggccgcggagggtgccaggttgcggggcggagggagggaacttgccagggtctcccggggagccgggaaggggcgggccctggctgcgggaagccccgtggagggtagcgcgtgaggtggagggtgtgtggctcctaaatccccggctaggccccagcaaaggggagagggagacgggagggacgggaaacggagctaagcgccgggcctggaggtctggaccggtcctgattgggggcgggggcggggagctcggagacccaaaggttcgacggggcggccggcgtccaggcgcgagcggctctgggctgggaccgagaccgggcaccggcgtcccgcggggcgggggtgggggattgggcagaggagcaggagattccgagccagaccggcctgtgtctgtctcgtccctccccgttttccgcgccggcgtcgggcccagggtgacggcagcccggccaacggggtcagcgccaagcagctggcggcggccgcgggcggttcttggaaagcgcgagaggctgggcctggccgccgtatttgctccgacaccgccccccgcccccccagctcgtcaccccgcctgcgtgcgcccggcccccagaccctgcctgggacgccccccaactaactccctgctgggacgggaccccacagccctggggagtgtcgggccccttggatcagagcgcgagtccccgcggccgcccccaggacggaagagcgaggggggcccgggggcagacacaggagtccccgccccgtcggacccgggcctggggggcgggaggcggccgtgcccgcgcctgaagggtgtcctggcccgaaggccgcagtccgggcgggagtctggacccgagagcctggggcgggcggggcggacccagggaagggccccccctcctcgcccccaggctcgcccgcgtgtcccgaggggaggaccccagaggcgcccggtcccccaggcagacagcagaggcaacgtccgagaatctttctttttataaaacacagggcgggggcacgcgaaggcagctcgggcgcggcggacggcgcggctcacacgaagatctggatgcggtcgcggatgggctggcggcagatggggcaggcgctgagcgcggagccgcagggggcgcatgcgccgtggccgcactggaacacgaggcggatgtggctgtcgatgcagatggggcaggtgatgcgttcctccatctgccggtagcggctctgcagctcctccaccagctggcgcggcgggccgggggcgggggcggcgctcgccacctcagagccgtctgcggggtgggggacgggtgtgagctgggaggccgggtgggggaatgcggggagcagggagctgcgggggggcgaggctgggggcggggtgtcacctgggacgggttgtgacctgcaaggggggctggcggggtgggtgatttggaggcagaggtggggcccgggtgcgggcaggaggtgagccgtggaaatcaggcataaggtggtgtgcgggctggagtcagggctgcaggtgggctgtgagctgggccggggtgtgatgggggggcggtgctctgggtgggctgtgatctggggtggggctatggagggagtgtgatctgggaggggccgtgaaatccagcggggctggggtgtgatgggggaggagggtgttaccttgaggcggggctgtgggccgggtgtgatctggagcaggcggggctgggggctgggggctggggggccgggtgtgagccttgggagggcggggtgtaacctggggaagggccatgggcggaagtgtgggagggaaggggtgggggacggggacccgcgggccaccagctgagcaggaggcgtgttgggggcgcagagcctcacccacctgggcgcagtttcttgctgacgaccacctggcacctgatgcacttcttcatcctgcgcgcgcactctgcgaagaggagagcgcggttggctgcggccctactagccgggcctccccaccccggggccccccactcaccctcacacacggtgcggtgctggcacggcgagaacagcaccagcagcgccagctcggagcacaccaggcactcagcggcctcgggccccggcgcggcgcccacgtgcaggttcgtcacggtgttgggggtcccgagcgtttgcctggggcccggggccgcgcccccgcccgcctgccgctccctgcagggggaggaggcggcttgagaggggcccggaggccgccggaccccatccccgccgtccacggactcaccggaagcgctgggcgcagccctgaagggccttgagcacgcgaccctcggcggccaggtccagcgggctccgaccgcggtggttggtgtagctcacgtcggcgccctccagcgccaggaagcaggcgaccgccgcgcccaccgtcagctccgcgctgccggggaggcccgaggcctgtagctgggcggcaggacagacgccggtgagggcgggcgccggggcaggcccgagggaggcgtctcctggcacctggcagccccagcagccggcgc

SEQ ID NO: 10932 - DNA, 1264 bp, Homo sapiens
  source 1..1264: mol_type = unassigned DNA
cgcgggtgaatcgagcgtccctccgctcccctggtctgtagttagagacagtcccccgtcgcccgatcccgcacccgctgaggagcgcagggctgtgcccgcacctcgcctcgcacctgtctgcccagggaaaccgggagctccgcgggccccgccgcgggaaggaggcggcactgggtcccaaaaacccgtgttgaggagaagccgagcgccccaacacactcgccgccggccgggccgggcccccgcgcgccccgacgccgccccagccccgcccgcgcgcgcccgacacgctcgtccccgccctcgctccgacacagacacacgcgcgcgtcctcgcaccactccagaagctcatccggcccgcgcgcgcacccagacacgcgtggctcacacccgccgcacacgcccctcgcacaaacacgcgcgcccctcacgccctcggccactccagacacacggccccgggccccacgcaggctcgggcgtcgacacaccctcgcggcatggacacgcgtgtctcccacccactcctcggccaaacgcacccctccctgcagcccctcacccttgctcctcacactcactccccactctcgccccagaaacacgcccctcacaccgggcccgccggatccccacacttcccactcgcgccagaaacgcgcgcaccctcgtggcccctccctgccgcgcgtaaacacgcccggtccgcgcacgccctcccggcctggccccgcacactcgcgccagaaacacgcgtggccgcgcaccacgcccccggcccgcgagcacgcgtgtccccacgccccggccccgcccccgccccgcgcgcgcccccgccggccgccgccctcgaccgcacgcgccctccgcctagccccgcgccgccgcgcacctacccggacctgctgagctcggctcctgctcgtcaggcttgcgccgagccgccgctcactggctcccgcgccccgcccggccccgcccggcccggcccagcccggccccgcgcccgctcagctccactcgccgcagctggaacgactcgcggggctccgggtaccgcggtctccccgccactgcccgagtgcgccgcccggaccaatggcggggcgcggcggtgagctcaccggaccagaccccgccccccaggccgcgtggtccaatcggaggatgcgacgtcacccggagccgggcagaggctggtgcggggcgcggagccgctcggcgcggggactgcgccggaactgcgcccgagccgcgc

SEQ ID NO: 10933 - DNA, 716 bp, Homo sapiens
  source 1..716: mol_type = unassigned DNA
cgacgggcgcgtgaggcccagagaggagcagccccgggacccgtccctccccttgcctgaccctggctaggaaaaggggcctggagcgcccccgggctccggaaacgcgggaccctccgcaggcagccgagcagggcggccgccggggtcaccgctgggcgccgccggagctttaattcgatccatgtgcgggactccggccttttgtgcgggagcttccgccctgcgcgccgggtccccggctcccgctcccgggctgggactcggccctccgccggcctcactgagccctcgccccggacctgccgactccccgactccggggagagagaccaagagactgggacgcaaagggcgtgaggaccgcaccccccacccgcaggcccctccaggggcgccgcgccgggggtcccggctggcgaccgagcaggctccggccgagcactgccggcgctgtcacctgtgtgcaccggggacagggacggagggacgcgacccccacccacccggcccgcttacctgggccgcccgcgccccggcggctccgatccgacgcccgagccagcggagcccggagccgctgggcctcccgtcccctccgcccgtccgccctccccgccccctcggctccctccgccccgccgccccgcgccgctttaccataaaaggtgaggctcggggggagggggcgcgggattcccgccccgcggaagcgg

SEQ ID NO: 10934 - DNA, 619 bp, Homo sapiens
  source 1..619: mol_type = unassigned DNA
cggtggaccgcctgggcgggcaaacgctctctcacgctggcgggcaggatttgaacccgggttcctagggctctgcaggccgccactgtccccgtcctctctctgtctccggcttctcccgcctggcctgccgcggcccgccgccccctccttcctcccctcttccgcccgccccctgccccctgcctcctccctccgccttctcccaccccctgcccctcgcgacttccccctcccccccgatcctccggcgccgccccctcctcctccttgtcctcgcagcccaaatacgcgacacctggagcaatagcagccgcccggcggcctgggcctcattacaggccggcccttatcgcggcgtgcatcacattatttcatttcaaagaatccgcagagaaacccgtcccggccgacaacagaaagtaaaaacacagctgactcccattagggccctctcacaggctccgcgtgaggtaatgaaatatggaagcggtgagatatgtaatgctttattaagcggtctcagctacaacggcgtgcatgccaattacgcctgcaggctaccgcccgcccccggctgccggaccacccagcgcgcctccccccgagtcccggacgg

SEQ ID NO: 10935 - DNA, 293 bp, Homo sapiens
  source 1..293: mol_type = unassigned DNA
cgctttacggggcaaactccgaggcccagccccgcgtgggagccgcagcggggcgggcccgctctgggctgggcgggtttctctagcgcagcgctgggggttgcgggcctctcagcagccggagcagcatcctgagctccggttgttggagcgctgggacctctggctgccgcccccgcagcagcagcaaccactactccgctgtcggcggcgtctccttgggaagcagcagcaactggtggagctggagccgcagcagcctgagtcgccgcagcagcccctgccggagccgc

SEQ ID NO: 10936 - DNA, 2748 bp, Homo sapiens
  source 1..2748: mol_type = unassigned DNA
cgaaccggtctcctccggcttcgcattctccagggccgcccggcgagctcttgcatgttccccacccgccaagcccgtcactcggccccgccctttcacacgcgcattggcacgccccttcccagcccccagcgggcgggcagcctgccgggtacccaggaagctcgggtccctcggcgccggaggacccacaacccagccaccgcaacaagtccgcgcagccaaagcagctcgcctgggcaccaggccccaccgtccttgttccgtggccccaagagggcccgtgccagttcccgaggcatggccgcctggcgtccggcacatcccagatctattcctctctgagggcaggggctctccggggagagaaagagcagttccggggcccgcttcgggtttttttgcatagactcttcaggcacggagaacaatggaacagctctgcgcgcttcctccactcgagcaagctttgttcctcccttcccgcctgctcggcttccattagccacagggcaaaggcttcccggtcaaacaggagtctcggcgctaacgcccagagctttcgacacgccctaaaagacctgcgggtgtaggggttggggccagagccggggctgaggtatcggacatgcgcccagatgcgcacagctggcagcccgcccgcccccggccctagacgcttcttttagccagaatcctcacaccgcggggaaatccgacttgcgctcccactcgggatccacagaggaagtggagcctcagctgtgttccggggccaatcagccctcacatctgctctcccacatctgtcctctagatccgggctctcgctggacgctccccttgcaatgcgggatgctcctgtcaagcgcaggccacaccacaacggaggtttccaccagtcccaggttttgccatattgggattctggctctatttctgagagcctgtaaccccctcaccccccatcccattgtccagcctcacctcgggcaggccagagtcgagcccgggttcccgcctgtaatgtctttaagaaggtacacttgagccatgcgcatctggaggtgggccagctcagcacatctgggcgcaatgcccatcacagcctgatcgtgaacaggagggccctccgggaaggcgcaaggggagggggcttcgctttccccacaccttccccagcagctggttaggagaaagccaggggcggggcggggcggggcggcaggacttacccagcatctggctgaagagcagctgctccaggtctcccagcacggtcaccaccagctcggggtccaccttgaggaaggcgcgctcctcctggcccttggcagaggggacaggcccagagctcttttgcgccttggccttgctggagagcagctcgtcgtccgatttgccatcttcgctcacggccgcttcaggcgccttgctgagcggcttgacctccgcatagggtcctcgagggatccggctcggctttcccaggttgggcgcgagcggagccaggggggtcttggcgccgcccgccgggctgcccttggcctggaagagcgagtgctccgacttggacagcgtcttggacatcagcggagcttcacggcccttggaccccaccttgcctaagcctttgggcgccttggccatatcgtcgctccattcgggctcataaagctgcagctttttctcggagtccgtgagaaaagagaggttggtgagtgacttctgcttgcgcaggttggaggcgggcggcccgccggggacacggctgtccacgctgccggacttgaagaccttcagctcagccgcgctggccttggccatgccgccgccgccgccgggcgccttggcgcgcttgggcagcatgcctctgccgtccgccgctgccgccttcctgccggcgccccgcggttcgtccgcgccctcgtcgccgccgccgctgctcagctccacctcgggctgcacgctcttgacgctgctgcccagcattctgcccgcgaggagcgcatggacgatccgcgcgtctgcaggcacggggggagggggcagggggcgggagcgcaggaggaggaggcgggggaggaggagggggagagagaggacggaagaaaccgaggaagaaggggagagaagggggagagagcgagggaggagggagagaggcaagccgagggcgcaggggaaagaaacgcgaggaaggaagccgggaaaaaggaaagagcagggaagccggggagcgatagggcggggtcggaggaaaaggggcggggcggcggggaaaatacaaattaaaatttaaaaatcagtcaaaggaaggatggaagccccgcggctcctccggcgcccagcggtgcttttgctttggtgtccggatcccagcccgcggcctgcctgcctgtcagtcccgtggacaccgcactgccgggcagcgccccggccgcactcagccagccagccagcccgagtcgaggctgcaggctgcagctccgagcagaggaaggagggaaggggaaggcggggagcaaacaggaggaggggagcgagtgtgcgcacggggagggaggtgggggagagatagtgtgtctatttctggctcgggagggggaggtatctgcgagcggagctccaggggcggatgagtggggggtagggggaaataaaggaaaagcagtttttctcccagctttccgcgtagaagcggggcgggttcttggattctcggagggcacggggaccccctgccgt

SEQ ID NO: 10937 - DNA, 433 bp, Homo sapiens
  source 1..433: mol_type = unassigned DNA
cgggactgggcgctagccagcagcccgcaggaccaggcggggacaggcgggcagtactcacaggtaagccgtcagggggtccaggtcccccggaacggcggacagcccgagctcagagcagtcggcagacagcatgatgccgtcctcctggcagtggcagggggccgggcaggcggtgggccccgggccgggctggggggcgccgccggccctccgggaagcgcacagcgcggcgcaaagccatagcgcccggagccccggcgggctgggcatctcggcggtcgggctactggggcacctggcggccgggcgcggacgcacggcgcgatggccgcagctgcttcctcccggtcccggcgggctgcaccgtcggtggggaccgccccaggggctctattgggcggcggcggcggcggtgggagcgccgggacgg

SEQ ID NO: 10938 - DNA, 1376 bp, Homo sapiens
  source 1..1376: mol_type = unassigned DNA
cgcgggatccccactcctgcgaggcctccagagcccttctgggaggaggcctccgctggaacgtgtctgggtgaggagagggagatcggctcccaggcagggacggccagggtgcgcgcaccccagcttctgggccatcccggcgggagtctgcgctccttttaggcgcgacccccaggaaggtctcgggtggtgaccgcagattggagagtgagctgggctggggaaagagtgaggcggatcgcccccaacctccggcaaagtgtgcgcccccgccccaccatccaggggcggcggctcttgatgagctcatgggggcggggcgccaggagtcccgcccgcgagcccccccctcgtccccgcgaagcagcagtccggaatccgcggccagggacccgcgcaggcccctccttagctgaggggcggccgggtactcgggtcccgacccgcgaccaccgcacccatcaccaccacagcgggaactgcccggcggcccccagaagccccggcccggccgcagaggtgggcccccgagcacagaggccccgaaactcggctcgcagccctcagccccaatgtcggggggcgcggtggccccgggcgaccccccaccccgctcctggagcccacaggtggccccacaacttcgcggcccgcgctgcgcccgcggggcctagcacgctgccgcgggacctgcccaacgtggagtgtgtgcctgccccctcccgccccggcccccggcgcagcccttacccagaagacgaaattgaagacgaagagcaggtacttgatgcacttggtgcagccctccactcccatggcggcgcgggcggcgggcggcctgcggggcgcgggccggtcctgggcggcgggcgggccggcgcggggcctggcgggtggccggcaagggggcctggcgggccgaggggcgggggcgcgaagaaaggggcgcgggggcgcgggggcgcgggggcgcgtggggcgctgggcgccggaggcctggcaggatgcgcggtggggtcgccgccgtcgccgccgttgcgcgctcgctctctggccgggcgcgcgcctcgctccgcagtacttatagggcgccgcggtcccgcccctccataggccccgccccggccagctcacgccccgcccccggccccgcctcctgccgccagggcgcgcagccgaggggtatggggtcgctgcacctacccccaacttggcgcgtttcggccaggacctcagggcccaggtgcaccgtgctgggcgcgggaggcgtccccaagctgctgtcgcgctccgagcccccaagggggtggcagcagggccgcgcctgaggacaggcatgcagcgtctgcccaggagtgcagccccggtgccgg

SEQ ID NO: 10939 - DNA, 3393 bp, Homo sapiens
  source 1..3393: mol_type = unassigned DNA
cgcagcggaggcgggaggagagtctctggcgggcatttgtcccccgcgcccctcgcgcgcccaaggctgggctccggggcatctcacccgggccgtcccgggtccagccccagtttagaatgactccacaccccccacatctccaagtctcagaaaccatcgttctgagaaccccaaggaggacaccctttcccgggtcttctgcagcgccgagccccggcaggcctccccggcgctcgcctgctgcgagaccttcctgccgccccgaggagcacgagaccccagccgcctgcagatcacccacatttgcggagggtggcagcaggggcttggctggtttgaaacgcgccggggaggcgcgcgctgcaccaaaccccgtccctgtccccaagggcagactcggggtaaggggaccaagacctccgacgcactcagcgccatggggacagccatggccaacactctgtctctgcggtcaatcccaaggttaccaaaactctccatccgcagagagcgcgcacagcagtgcggacactcggggactgccttaaggaaggctgagccctgggagcgcgtggactccgccctaccgcccggcgattggctcgcggggctgggggcggagaccgagtccgcgctgtataaatattcatgagccggcagcgcggcgcgagcggggctggagccgggaagttgggctaagggcgctgctcccgccgaggaggaggcggcggctgggcgcgggccgcgccactcaggtgtccgctccgccttccggtctggatttgctcctgggtgtccagcaggaaggagactgtgtgcacctcgcccgactgcggccggagcgcggcgctgacttttccaggcggcgggggtccgtctgtcccggcggcggacggacgaaggacggacgccggagaaagagggcggcggcctgggccgaggcgggtccccaactccggcggcggcggcggcggcttggccttgggggcgggcatgagcccccgggggccgagtggtggccgccagggctgacccggcgcggcaagcggcccggcccagccatcttgactgcgcaccgcggccccagaggaaacttgcggcgcctccgccctctctgtccggcggagtcaccgccgcccggcgcggcggggagaagtggtcgggcgcgcggagaggaggcgagcgagcgcgggacgatgagccgaggcccggccgctctgcgccgcgagggctgagcgcgacccggggccagcagagcggacctacggactgtggcgcgcgcctgcagccgccttcaaacccccggagcggcggaaaggagtgcggaagggccctgcccaggctgcgggccgcgccgctgcggacgcgcccctagaaggggttagattatcggcagacccccctcccgggcgaagcataagggagaccccagatcacccgctgtacccgtctgcggctctctcgtgggccccccccccggcacccctctgcgcgccgcctggagggcgagggcaccgggccgaggcgcacagcatggagtggggttacctgttggaagtgacctcgctgctggccgccttggcgctgctgcagcgctctagcggcgctgcggccgcctcggccaaggagctggcatgccaagagatcaccgtgccgctgtgtaagggcatcggctacaactacacctacatgcccaatcagttcaaccacgacacgcaagacgaggcgggcctggaggtgcaccagttctggccgctggtggagatccagtgctcgcccgatctcaagttcttcctgtgcagcatgtacacgcccatctgcctagaggactacaagaagccgctgccgccctgccgctcggtgtgcgagcgcgccaaggccggctgcgcgccgctcatgcgccagtacggcttcgcctggcccgaccgcatgcgctgcgaccggctgcccgagcaaggcaaccctgacacgctgtgcatggactacaaccgcaccgacctaaccaccgccgcgcccagcccgccgcgccgcctgccgccgccgccgcccggcgagcagccgccttcgggcagcggccacggccgcccgccgggggccaggcccccgcaccgcggcggcggcaggggcggtggcggcggggacgcggcggcgcccccagctcgcggcggcggcggtggcgggaaggcgcggccccctggcggcggcgcggctccctgcgagcccgggtgccagtgccgcgcgcctatggtgagcgtgtccagcgagcgccacccgctctacaaccgcgtcaagacaggccagatcgctaactgcgcgctgccctgccacaacccctttttcagccaggacgagcgcgccttcaccgtcttctggatcggcctgtggtcggtgctctgcttcgtgtccaccttcgccaccgtctccaccttccttatcgacatggagcgcttcaagtacccggagcggcccattatcttcctctcggcctgctacctcttcgtgtcggtgggctacctagtgcgcctggtggcgggccacgagaaggtggcgtgcagcggtggcgcgccgggcgcggggggcgctgggggcgcgggcggcgcggcggcgggcgcgggcgcggcgggcgcgggcgcgggcggcccgggcgggcgcggcgagtacgaggagctgggcgcggtggagcagcacgtgcgctacgagaccaccggccccgcgctgtgcaccgtggtcttcttgctggtctacttcttcggcatggccagctccatctggtgggtgatcttgtcgctcacatggttcctggcggccggtatgaagtggggcaacgaagccatcgccggctactcgcagtacttccacctggccgcgtggcttgtgcccagcgtcaagtccatcgcggtgctggcgctcagctcggtggacggcgacccggtggcgggcatctgctacgtgggcaaccagagcctggacaacctgcgcggcttcgtgctggcgccgctggtcatctacctcttcatcggcaccatgttcctgctggccggcttcgtgtccctcttccgcatccgctcggtcatcaagcaacaggacggccccaccaagacgcacaagctggagaagctgatgatccgcctgggcctgttcaccgtgctctacaccgtgcccgccgcggtggtggtcgcctgcctcttctacgagcagcacaaccgcccgcgctgggaggccacgcacaactgcccgtgcctgcgggacctgcagcccgaccaggcacgcaggcccgactacgccgtcttcatgctcaagtacttcatgtgcctagtggtgggcatcacctcgggcgtgtgggtctggtccggcaagacgctggagtcctggcgctccctgtgcacccgc

SEQ ID NO: 10940 - DNA, 1381 bp, Homo sapiens
  source 1..1381: mol_type = unassigned DNA
cgtctcaacgtgctgctctggtaccaggacgcgtatggggaggtggagataaacggtgcgtggggcccgcgtgggcgcgaggaggggtcgccacggcctccctgagagtgcgctgctgagctcggctttggaggcgtgcggcggggaggggttagcccccgggtgctctgtgcggcccggctggggttaaagtccggggcgggtctgcccctgtgcacgtgggagatggttaggggtgttggggaccccgagggctggtgtgaggcctcgggagccatcggggtgactggccgccgtccgcagacgggaagctctacgacgcctacgtctcctacagcgactgccccgaggaccgcaagttcgtgaacttcatcctaaagccgcagctggagcggcgtcggggctacaagctcttcctggacgaccgcgacctcctgccgcgcgctggtatcccgggccccaccccgtgccccgcccacccggagggcccgccccgccccgccccatgctccgtcccacccggggccccacccccaccatcgagctccgcccccatccccgcccacccgaggccccgcctcaaaaacccgcccaccccgcaggccccgcccctcccttagagctctgcgtccggcaccgcccctgagcctccggccccgccctcccccgcccccgcccctgcgccgccgacgcccgccctcccgcagagccctccgccgacctcttggtgaacctgagccgctgccgacgcctcatcgtggtgctttcggacgccttcctgagccgggcctggtgcagccacagcttccggtgggtcccgcgcggggttgggtgggccccagcgtagcacccacccccctgacggtcccgccccgcagggagggcctgtgccggctgctggagctcacccgcagacccatcttcatcaccttcgagggccagaggcgcgaccccgcgcacccggcgctccgcctgctgcgccagcaccgccacctggtgaccttgctgctctggaggcccggctccgtggtgcggagcaggcgcgggagggtccggggctagcggcgggttagagatgggcggtgcccgggctccaggctgggacccctccgtggggagctctgcggcaccacgctttgtgaatgggccctggggggaggttccgctgcctggggccccgatgcggggagccgcccttgaggcccccggagccacggaatagctgtcgcagggcgtggaacccgtgggcagccgcaggtgtgctcttgggggccaggacgccaggggcttccgaggtgttcacacctgcaaaccgccccgacctggcccccagactccttcctccgatttttggaaagaagtgcagctggcgctgccgcgg

SEQ ID NO: 10941 - DNA, 493 bp, Homo sapiens
  source 1..493: mol_type = unassigned DNA
cgagctgcccttgggcgcgcctggggctgcacctgggtcacgtgggcgccgttgtgcagccggcacctcccggccaaccccgcggcttggagaaggggctttgcacccgccgccgctgtttgtcctcgcgcggcccccgtccactgccctgcggttgctctgcgggctgaaaagtttctcccggtgcagaattccgggctcagcgacagcctgcgccgagtgtgcgcacctgtcggagacccgccagtccgccggccgcggtgagtggtccctggagtcactggctcagggcgggcccgcgggatggggcgggcggcccggggcgcagccggccaggccgttgctatggcaacgcggtggaaaaacgggcctctgggtatctcgctgccggccggctggtaaccccccagcggagggaccgggccgagcccgcggacccctccgagtgtctcctggggcccagccgttggtaccccatttcccccgggtccgg

SEQ ID NO: 10942 - DNA, 922 bp, Homo sapiens
  source 1..922: mol_type = unassigned DNA
cgtgcccccctccgtcacttggtacggcccgtgcccccgccgctgatctggcaggctgcgcgcgcacactccggccgggtgcgggccggcggggcacagcggcctctacggcccgcctccgtcagtcattccccggtccctcctcccgctgctcgcgtgctccgggccggcccagcaccctccgagttacgtgcccgcgctccccggcggggaggagcgcagccgcgggggcgcgccccggtgactccgcccctcagctcccctcccctgagcccgggagcccggctcgcgcggctaggtgcgaggagacccgggaccccacgcccgcccgccctgcccagcgccccagccccggcgtgcgaggcgccgctccctcctctgccctgcgcggtgcatggaggggcccgttcggatcgcagccgccgccaccgtagccgccgccgcgcgcgcgcggggggatgacctgggggtggctttccgagccggctgcagcgcaggaggtctggaggcttagccagccccgcggagaggtgcgggggtgggggtcccgccgcagggtcggagggaggggtggcgcgcgggcactgggcttggggggccttggcttaggggacgggaggtcccggggacgggcgggccggcgttccctggagggcgtgggggtgcagggctgcgtgcggggtctggatgctgatgcttgcccggcggggagccccggcgttccgcgtcctcgggggctcggaggcacctcgcgggaggaggcggggtgaggtgtcagtgacacgacgaaacctcttcttgacgatggtcctcgggggcaggtgagatgccgcagagcggggagctagggcgcccgcgcgttttcccaagggagccgggtccctggcctctctcaatctccatccctgcagagcgcccgcga

SEQ ID NO: 10943 - DNA, 719 bp, Homo sapiens
  source 1..719: mol_type = unassigned DNA
cgctcgaggatgctggaggtgggggccgccgcttcagtccgggcgcagggctgggggattgggggcggaaactttccgcagaactgtcccgcttgctcactccaagggaacggagaggatccggcttcccgcgaaaatctggtccagggaaagggaccccggaaagcagctccgcagggctgtggcagccccaccccgacccgcgctgcgcccacgtgcagggcccgaccccctccgggaggcgcggcgccggctggggtcaggcggccgaggaccccgcggctccccgccccgccccgccccgcgggcccccgcgcaccgccgccgcgtactcaccctcacgggtggagcggggcggggcagcacggttccgcgcgcagctccgatccgctaggcgcaccgaccggcggcgcagcgctggcgcgacggctcgactcggccgggtccctgtcccgggcgcgggtccggcctgggagcgggcgagtccgcctgcaggggaggcggggacccgggcccgggttgggggcggggaaggggctggacacgcttgcgcacacggcggcccgactcccaggagctcccgggaggggtagaaagggcggggtggaggagggggaagggcgggggtgatgccgcgcggtcgcaggcttgggatggtgttcgcgcctccgagacccggacagaggcaagcaggggcgccgtgggtgccagagaggcgg

SEQ ID NO: 10944 - DNA, 958 bp, Homo sapiens
  source 1..958: mol_type = unassigned DNA
cggtgcacggggtcacacagtcggaaacccttgccggccccgggttactccctttctgaaacggtcttcctcggagccatcccctggaggaccccacttcgctcggtgcccgggccccgcacccaccctccccttcccggcccgcttcccgcacggcgcctactctgttcctcgtcctctcgtcccaccgccgccctgcccacactgcctcccgtgggcgcccccggccgctcccccttctcgggtctcggcctgggggtgcccagcccgcccggcgccggctcaaggccgcgcgactccgcacgctctcgagacccgcctcgccgcccgccgcccgggccgcactcaccgcgcccgcaggacctgggggtctccgctctgctcgcgctccggcaccgccgccgccgccgccgccagcggaaacagggggcggggcctgcccgggaatggcgagcctgcggggcggggcggcccgggggcggagcggggaggggcggggcggagcggggaggggcggggcggagaaggatcgcagggctgagcggggcgccagcgccagtgcccggcactgccccgggctgggtcccctgcgttagaggaaggggagcccggggacggggcacggggcccgcgaggcacgggtgctctctcggggttccggaagcctccctccccgccccgccgcccgcatgcccggaccggccgctcctccgaggtgctatgatcccgccttccccctgcggcgaacgggcctcttcccggggtaggggcggggaggtccgggcctggcagtgcgctctcctgggctctgcgcccacacggcacccaagggccttcctggcccaggcctcggctctctccctcgcgccaggctgcctggcctcgccaccccacccccacacctacgaaccccttccctggtgtttcgggcggactgtgcgagatgctgacagcgcgg

SEQ ID NO: 10945 - DNA, 3843 bp, Homo sapiens
  source 1..3843: mol_type = unassigned DNA
cgcgcgtggcccccggagaggcgcccatcacctgcgtggcgcccccccgcgccggagtgcggccctgctcccagcgccagtgcgccgcgcggctcgccggcctcgtaggattggctaccgcctcccattcatgtaacctgcgtgtgcgtgtgcgtgtgtgtgtgtgtctctctctcgctcgccctctctttctgtgtgtaagagagcgagggtgggggacggaggcaggcaggcgagcaggcagggaggggaagaagagaagggaagctattaaacacacacacacacacacacactcacacacgcgcgcgcacacacccgccccaaccccccagaagcctcgggattgcagctgtttcatgtggggcagcagtgctggcagggacgccggccgggagcggccgggagcgggagccggtcgtgcgcgcgcggctggaggctcgctggggctccgctccccgcgggagctattgttggtctcgctggagctgagcgcagagcccggacctgctccttcctgggcgccccgctacggctcgcggagcagaggagccgcgccgccgagagagagaggagccaccggcgcggcgccttgcctccctgccgccgtcctcgccgcttccccggcggtagcagcctgcagccacggtaaggcggcgtgatccgctctacggaaaagcgccttggggaccgcggcgacgcctcgccagctccatcgccctctgcactgctggcccgggcagggttcgggtagctcacgcggctgccgagggctccgggagatgtttgcttgctcccctggcccaggaggagggaggctagggcgcgggtggccgaagaggcaagctgttctggagcctggagccgccgcagcccccggagcccgccgcggactggagcctgggagcaagggttgggggagggcagggaggtgggaagcgggtgggagggaggcggcgcgccccaggttcgtctgcctctcccggatcccgttccccgccccggcccggtcgcctgcagcccctctgcagactagctcgccccaggcccccgtcgggcgctggaggagcccgcgaggcggcgccgggcttcagcggctgcagcctgccctgcggggcaagtgccggctgcagcagccccgcacgggcggtggttggagctcagatcctggagatgcgaccccagctcctcgccctctgcaacccgcggggcgcccgcctctcctcaccgggcgcccggccgcggtattgatgttcgtctaggagccaactgaggctgcagccgccagatggacgcttggagggctcccgggtgtgagtgtgactgtatgactactctcacccccagcttcgggaaatgtgctctgggttgaaatgtgatcaccgagctcctcagtcattttaattgccatttttaaatgcggtcgttacattggaggagcagactggaaggtagtggggcggcgtgtgtgtgtgtgtgtgtgtgtgtgtgtggacacacacacgcaaccgaggaatacacaaccaactacttgggtgaagggcggggggttcacctagtgagtccttcttggcgggggggtcgggcgagttagctgcccgctgcccgccccttctctgcctgcccccgcctaggcgaggttggaaagtactggaaattcagctgcgtggtccttaactttggaaattggctccgctttcagggcaaaatgttaaggcgatttatgcacccgcgtccatgtggatgagtgtattactgctcagttgggtgcagagccctcaacagtaccgcgccaagcccccacccgatctctaactccctcccaccccctaaccgtggagagagggtttatagaaatgcagttatctgtaaaccatcgacgcagtgaaaggggcgcagggaggcagccagagttttgcctgaacctgcatactggcttggtgtttgtagcacacgagatcaccccgctgctttgtagaaggcggtggtggggcaagctcgggattccaatcgccggggtggggggtggggggaagagggtgcccatgtactgagctctgaggccgagtaaggagagagatctgctgagcggcatcgcgggcaattacataagctgcctcggtgattacccggaactgtgatgcgagctcccggttctcgaaagacaagcctgaaagtttgcctgcttggggagtgtaagtaccggggcgcccccaccccggcctgggtagctaggatacgcctcgcaccacggcgcccacttgtgcgatgggcgtcgggtgctgatgctgctgtccccaaagaaccggttaccgaggcagggactaagtgggggcatccggaattgatcgcagaggaggagtcagtcagaactgaggtttcattgggtcttcagagctccaagtcttccctcggaggtgttggaaggccttccagggaacgccgttttcagaaactgacttggtgtcctggggagccccaaagcccctcttttccgcccttcctgggcgcccctccttgtctttcaagccctgtgcccttcacgtgtttagaaacctgcccgcggtgcctggtcccccttggagatgcccaggcagcccagccatccaggcccacgctggcgaggggttagagggagtagaacgctggctctgccgggctgccacccttacctacacctattcctggtttcctgcgctagcccggcgctgatggggacgggatggggctggggtcgggtatggcttccgttccttcgcctctcgcctctgcagacagcagtttgcttctgttgcgtttattctccccgtttcgccgcttccctccagcgccgcagcctgtgtatcacgttgatgggctttgatagagaaaccacagtaagagtatgcttttaaatcttgattttcgtctgtagggggataagccaccccagccctgacacagccgtggggaacgctgaagtctgggacacattggccctgaactcccttccccccagcccgcagtcaggagatggtgatgtgcatgggtggggagtgttttgtttttgccacattccagcgtcctgaaacctctcgtcccctcccactgaaatccccgatctgtctgaatctgttccttgctgtaaaataaatcctccctcccgcagacctgtggggcccttcggatttcctgccgctgccatgatccttaacaatgcgattgaaaagccagtgctcggctggaaaaaaatccccaggtgccagccggccgcgccttgaccttgctgaaggagcctttaacccggctgccagaggggctctggtccagccgtgggaatccaggaagaaggagggcgccccggaggcggctgggttagctccccgggcagggcgggaatcaggtcgcggcggggaccgcagagggggaggggacgggactccgcggcaacctgtttcccggcgagccgggcccgcgcatcccagctccctcgccccagcccctcgtggcccgcctcccccgccggcctccagttgtcttcgtggtacaggagtcggccgcgactccctcgcgctctccgccggagtccgcgggacgccgccaactttgggctcctcggtggccggagcagcggtgcgaaccagcggggcggccgggtgggcggggcctgggcgggaaactggagccgagaagaccgcgttccaggccaagttccagccgcaagcgccgcgcggcacagtgcagggtcccggccgcgcctttctcccgtccccggcccggccgcgttcctgcggactcacagcgcgctccgggcgctctgcagttgggctttcagcgggggagcccttctcgtcaaagttacga

SEQ ID NO: 10946 - DNA, 384 bp, Homo sapiens
  source 1..384: mol_type = unassigned DNA
cggttggccgggggacgtgtccgcgctgctccccctccggccgccagggggcgcaggaagaagctttggaggtctgtcccgggaccgcgtactcgtccttctttcccgttagtcttttcttcacttccgttgagttccgcctcgccgtttgtcccttgcggtacccgtccgcatacgaatctagcccgggaaccgagttgcgggagtgcggtctgtgccgttccggccaggagtttgccgactgcagacgtcctgcgaaccggcaagatgtgctctctggggttgttccctcctccaccgcctcggggtcaagtcaccctatatgagcacaataacgagctggtgacgggcagtagctatgagagcccgccccccgacttccgg

SEQ ID NO: 10947 - DNA, 1432 bp, Homo sapiens
  source 1..1432: mol_type = unassigned DNA
cggacgccagggggtgcccccagctccagcgcagaaccccgccccgcacaactcaccggatcagccaggccgtcgaagggcaccaggtctcagctaccacgacgctccgctcgacgggtcgcagccatgcaggagtggcagaggctgcctgacgaagccctccttgggggtcgatgcctctctccgggtgggaaggggcgctgtcggtgagggctatcctggcgccggcctgcgccgtccgaagtcgggggggaggggaggtctccgttcagcaggggtcacgcccgccccggacgggggccgcgcgggcgctcaggcgacgcatcttcgccggggcccgtgatcgccacgtccggcgggcggcgctgcgcctcccctcggggccccgctcaaggctgcagctcggcccgcgccgctcccagggcgccctctccgcccgcgctgggagcccggcggccgcggcccctttcgccagccccagctgcagcctgtctttgttgcttcctctcgctcgcccgcccgcccgcggcttgcagcccccgggttcgccccgaggtggagggattgtctccttcgggggttgcacgcacccgcagcggccccggctcctcgccggacatacaccggcccctgcaggttgcaaagaacagcggcgagaatgcaccggcccctcctcctcctgctctgagccccgggtgtggggggaggggaagccggcgaacagcggcggcggcagcggcggcggcggcggcagcgggcgacgcaagctcggatgcagcctcgggggcctcggcgctgagaaacagccgatcccagtggcgcaggacggacacgaggacggcccgggggactgtgcaccgggtgtgcgagctcgcaagccgcagcaggggccgcgcgcgctgggctctcacgcgcccatggccccgggcggcgcgcgggggctcccggggccgcagcctcgcgccgtctggcgcgcgccggcgcctcgcctggtctcaggcccgggtgccgcgcgccgcgccccacaggcgccgggcccggctgtccgcctcccccggccggcgcgcgcagcctctccgcggagcagccggccaggcagtcctgcccgctgctccgctctggcccgactgacaggcgcgagcgccggcagcagcccccgcgtctcgtcccccgcccgccccccgcggcccagcccaatcagcggcggctgagaggcggttaccagggtgacgcggcaccgcgtcctgcgaggggcggagccgggggccgccacgcgcgcttttcgcggcaaaattcaaaggccggcagggcggctctccaacctcctcccccaagcagggacgaggcggaacttgcctcgcgaggactgcaactcccggcatgctgcgcgccggcgccgggtggaggggccccgactgggggcgcagggcgt

SEQ ID NO: 10948 - DNA, 325 bp, Homo sapiens
  source 1..325: mol_type = unassigned DNA
cgctgccgccgctgctcctccggcttccttgtcatcatccctcacgccctgcagccctgcctcctgttcacgggttgccaagccgcggcctggccggtggtggcagtggcggagttagacaaagcccccgcctcccccgccccagagccccccaggcgccccaagtggcgggaaggccgccagctccccaggccccgcgctctttgtctggcgtgggggtggggagccgcgcctggccccaggagcttcctggcctctgccaacccctcgctcctgcacactgcgctcattgtctgagatgcgccgagacggccttcgctgacgt

SEQ ID NO: 10949 - DNA, 1242 bp, Homo sapiens
  source 1..1242: mol_type = unassigned DNA
cgctcacagacaacgctctcccgccgctggcgctggtccgggatgcggccccgagacccctgcagccgcgcgctggctcaggggacctccgcaggacgcgggcgggcgccggggccgggtcgggcttgggcagagtgacaggctcccagtcgtgagcctcacaagcagatctatttacaatatcccggataggagtccaggtcgcgtcgctcgcgtcgcccgcggggacccggcgtgaattcacacgctcccctcccaccgcctcgccgcctgtcacggccccgagacccggtcagccccttcgggggttcccttcgccgcgcagtactccgcccgtgagcagcccccgcctgcgctcctccctccctagggcggccgcctccactcccggctcccacccagcggggatccaccagggcgagggctgaagacctcgcgggacgccgcgcgccggggacagcgacgcacctaccttcccagccacctgggaggctgcaggtccgggccggagcccgaggctcaggggcgcgcggagcagtcctggttaaggcgcagggcgcggggttgcatgggggtccagtccagcgtgcacaccgtgcacctcccagcgcagggctccgcgctctcccgtagcccggcaacggccgccaccccagagccccgcccactaggagccccgctcagggcaccgcccacccgggccccgccctcaccgcggctctcgccgtggctccgcccccgtccagagccccgcccccagcgcacactgcgtcagccggacttgctctgcagctgggttctttggaggcccccactccgcggctactgaagcggatgagtgtgaggctgactgggggcttggggatgggggaccggagaccaccaagaacatggctgtgttgggaaactttccttcagagcagagagggagggttcctttccgccggggtgttccccacctttcagcctttcccgcgtgggcccgcatcccagccagaggggatacggcggccaggtctgcgctgctgcgcctgagctcaggtcggcagaggtcgcagacctcggctcctcagccggcagggactcgcaggtgcgcgttcccacggacgcctcccggggaagcccgagttcgcctcctgcaggccgggaagcactcgccccgagacggccgcaccctcgcagcggaagggcgtctgcaccacagctgtagcaccagcgcgtgcgaggcggggccagggccgg

SEQ ID NO: 10950 - DNA, 1460 bp, Homo sapiens
  source 1..1460: mol_type = unassigned DNA
cgcgtctctgctccctcccgacctagtcgtaaattccgagcctcagcggccgccctctctctcctccgctcttcttgacccaaggtctcaaaagacaaacgtgtcacttcccgccccgcccctggatcctggtcccgaccgaatgtagtggggaccgagaagcgcaaggtccaggacttgttagaggggcgcgccaagggcgcccctgttccgccaggacatcaccgcctgggtactctacttcaccctcccgcagccttctttggggccgggcggggcggggcggggcaggggggccgggcgcggcctacgcgccccctcgagtgcgcggtgcgggacgggcgcggttgacgcgctcccgccggtgtctgtgcttctccgcaggccaggagggcatcctgcgctgccacccggacctggcgggcagcgagctgcagcggggcacgctcacggccgagtcgcagcgggaacagagcggcgcaggcctgaggagcctgggcgcggacgagcggctgcggctggccgagctcaacgcgcagtaccgcgcgcgcttcggtttccccttcgtgctcgccgcgcgcttcagcgaccggacggcggtgccgcgcgagctggcgcgccggctgctctgcccgtccgcgcaggagctgcgcactgctctgggcgaggtgaagaagatcggcagcctgcgcctggccgacctcctccgcgcagaccccgccaagctgtagctgccgcgcgggccagggacccgggacgcacaaccggacgcgcgggggccacggcccggagctgtgcgtcctgggcgggaggcggactcgggcctggaacagcgtccacacacgtgcacaaaggaagtggagaattgaggcaatcatacgagtaatgagtccttttgtccgcccacccacacgcgcacgcgttgccaaaatatccatattgtttagtgctttgccccggatttatccagctcactgcttcaattcttcactccctttgcggcccccgacaccaccggcctttgtggattccaaagcgtttatccagttctccccaaccctctcctgctaagcccgaactgcaaagcaaaacggacggaaaaggaatcttttatgccacagcggtttgtctgtttttctcttttcccacttcatttgctgcgcccgacctttacatgtgagcggaagcggtgttctcgctcttgggcactaggggagcagactgggagccaggaaagtcaaacgctggcctcggtccggcctggggagccggggaagccgcaggaaggaggcggtgggccgggaagagccctgcgaagggaagagccaaccgaagggttgggaaggcgccccgtggggacggacggaatagttgcagccatcgctcctaaaaggcgggaggcgtccagctaaagatctctcccggaggtcggctttgggggggtggctcgactgccccgg

SEQ ID NO: 10951 - DNA, 1064 bp, Homo sapiens
  source 1..1064: mol_type = unassigned DNA
cgactggcggctgtgtggcgatagcgcacgcctagttcctggaaagctttgcagtccatcaggagagtctccggggcgcctccctctctggctcctccagggacctgcgggtagtggaggagttctccatagcgaggcagcgcgcccaagccggacaggatgcccacgcggcactcctctgtctcgggctggaaggcgaactccaggctccgcgcgtccagggcattgctggtccccagcagctcttccacgaccagaggcaagttccgagtcacaacctccagctgggtgaagaccacctccacctccagtaccagtggtagcactactgcccctccgggcgcgtcatagcgcagctgcagccggacgcggtcccgagacgggctgcgcgcgcccaggtgagagtagcgcacctcgccagggccaaagtcgcacgggaagcgcttgggactcaggcggcccggtcgctgggccagtgcgtcgttgtctagtaccgaaaccgcgcagcggtccccgggctgcacctgcaacaccaggtcatgcaggggatccagccagacttcacggccgaaaggcacccggagtccgcggttcgccagcactatggcctcctcagcagggacccctgcagcccccgcgagaccaggggacagcaacgccctgccgaaggcagcgggctgtgccgggacgcggcttaccagtgacaggagaagcagcagcagcagcagcagccggggcggcggtggcggtcctggttgaaagctggtggagttgcctgtccggcgcgaggataacccgggagtcccggctgagtgcatggtcccggtgttcgggcttggacaggtcagcctgagagcatgcgaagtcggtccccgggcagacaacaagagacaccgccgggaagtgccaggaactccgcgcgttgcccgcggggtcctcctgtagccggggctgggccagaaggatggcaaagttgcgcggcgccgtccgggctggagccgcagccgaggagccgaagccttcccaggccgtccagctccgccgctagcgcctcaatcgcgcgg

SEQ ID NO: 10952 - DNA, 622 bp, Homo sapiens
  source 1..622: mol_type = unassigned DNA
cggcctgccacgcgctcccgtcggggcccacccgcacctgggccggggctggtgtccacgcgcgacggctcgggagcacggacctctgctccccgcagcaccgccccccgggtggagccggcggccccgcctcgcagagctggggctgtacctggggcaacggggccgggcctggacgtcaggtcggaggagtagcacctgccaggagcacgtcccgccggcaggtcgcaggagccctgggagccgccgccatgggtacgctcggcgggtggggggccggccgggctaaagactcggagctacgcggggcgggggccggcaccgagggccgggaggcgcgaagggtacgcggcggcgggaagcggggcgacccgaaggcccacgggggccgggaggttgcggggcgcccgggatcccctcccgggtggtcaccgtgcggccggggcgcggaagccagaggtgcccagaggcgccgactccgccgaggttgcgatcctggcccgcccgcccgtggggcactgtaatcctcgtattcccaccctgcgggccgggagtgcgcttggagcgggacgggacccagcgggtgacggcaggggcggcagaaacaccgtctaactggcgg

SEQ ID NO: 10953 - DNA, 1622 bp, Homo sapiens
  source 1..1622: mol_type = unassigned DNA
cggccccaccgggctgcaagggccgggaagctgtgccgggggcgctttagaggccagagccagggagggggcccgcgacacaggcgggtcttccaggcgggcccagggccaggacagcgcggcatcacccggccagtcctctgcagccaggatgaaggccggggacagacgttcagtcctagaccctccagacagggctgggcagtgccggtgggtgcctgggagaggcggaggcgggcgcacttccagcaccaggttcgggaaggacacggtgcccagccgctggagcccctggcctgcgtgccccaccctgattttctggcatctggtgaacggcccctccgcagggtgggggtagccaggggatctgccgaggaaagctggggacagcgggcttggtggcgcggcccggcgcggcgcgtgcctggggcgcgtggccggccacagaacccggggagggtggaggctcccgggcacgcgccggggtggtgggcagcccgggacggcagcggcgatccgtcacctgaggaggggcggggacttcatcgcggccaggccgaggcgccgagggtcccttgcggcttccgcccctctccgctggccccgacgccgcgctcgggccgggactcgagccccggttccgcggggcaggctcaggtctgcgcgctgcgcctgcagccgaggcagaaatccgtcccgaggcgcgggcgccgggtccgggtcccaaggatgcgcgtcgggctccctcccgcggggacagccgagctccgccggcgctccaggtgttcccgcagtgcgtccgggcgcggacgcctctctgccctcggaggggaagcgggagggcccttggggtaacgccccgacctcgggcttcctaacctgggtcgacagccggctggcacagggaggcctgcgcgggagaggggcggagagagcgcagcgcggggcacagcgggcggtctccgtgccgcgcgcgcgactggaaacggcgtgcagatcctaaaacgagggttccacagagggccacgaggggcaggagagagtccccggagaactctagctccccgacacggctacctcttggcaaacgagcgagaattggggcgcagagccttgggagggccgttccctcggcgggagcggcccgagcacagcctcacagcagatgcgagcgcggcgggcgctttggtgacgaagtagcgggacctgcaggaggcagaggcctggtggggccgtggacgccacgccgagctgcccagacccttccagaagacagtggggactattcaacggtttccagcagaaactaagccaggtgttcgttttacggagattgctcggctgcagggtggaggctggatgagaacaggcgtcctctcaggtaggcgctcgtggtggtaacgctgcccaggaggagggcacgggttccgggaagacttgcgaggttaaaccggcagctccggagaactgagcgcaagaggtcggtgacacagagaggagtccgggaggccgcatgtttcaggctgaagtcacttggcggggacgtttattgagatgcgaaacacaggaagggatagaggctgcgcagagggaaaaggcgatggactcggttttggaaacgc

SEQ ID NO: 10954 - DNA, 324 bp, Homo sapiens
  source 1..324: mol_type = unassigned DNA
cgacctcccgagggaggagacagcgccgccctcttacctgcacaggtgctcccgtcgtaggtctcgcacacccactcatggcactcacacaggggcccgaagaacatgcccggctcagtcacgtggcagatgcagacgccgcagtcgcagcggccccggccgtggcacagcgcggcccccgggggctgcccaggtgcgcggcagcgtcgctccgactcggcccgggacagcctgcaggcggcgcccggccagctcctgcgcgggcgacaagcaaccggcaggccgggtcagacgcggacgccgccccctgctccgaacccacgt

SEQ ID NO: 10955 - DNA, 1881 bp, Homo sapiens
  source 1..1881: mol_type = unassigned DNA
cgcactcggttccgaagaaggcgtccctcggacaaaaccgaggaatctgtcctgctctgtaaggaactagggcttgctgattcccagattttaacgagaatccctgctccccgtaggcgctccataaatttttactggacaacttcaccgcgcgctactgggcctccgggagacccgtgactcccacccgctctgggcgcgggcccgcagagcctcaacccgcgcccccggcagccgggattccccgcccggaccggctcccaggctggaaacatcatggtccgcacccggggcgcagccgagacccaccgcgccggaggccccgggacccgctcagaccgctgcttggccactctacgcccctgagccccccacacagccagccccgtgacctccgagccccgtgacctccgagccccgtgacctccaagccccggaagccgctgtaggcagcggcccagccaggccccgccccctccaccggagctccacgcgtcaattccagccaggccccgcccccggccgccccaggcgtggacccaagccaggccccgccctctgcctggctactccaggcgcccaccgccccaggcgtcctctagcccaagcccaatgcccggctgctccagacgtcgacagccccatgccccgcctcctaatcggctgctgctggcgtcctctggtccaggctccgctccctacccggctgctccaggcatcctctaggctagaccccgccacctaccggccgctccaggcgtccgcagctccaagccccgccctccgcccggctgctccaggcggcctccggctcaagccccgccccctgcccggcggctccagaggtccgcggctccaggccccgacccctgcccggctgcacaaggcgtcctctgggccaggccccgcccccagcccggccgctccaggccccgccccgccccctctgtgcgcgctccgctcggcagcctgtgggacgcgaccgcggcgctagtctcgttcctttgtgctgcggcggcggcttctcgagtcctccccgacgcgtcctctaggccagcgagccccgcgctctccggtgacggaccatgtcggcggcgggagcgggcgcgggcgtagaggcgggcttctccagcgaggagctgctctcgctccgtttcccgctgcaccgcgcctgccgcgacggggacctggccacgctctgctcgctgctgcagcagacaccccacgcccacctggcctctgaggactccttctatggctggacgcccgtgcactgggccgcgcatttcggcaaggtgggtgcgaacgctttaaggcgccattttccccggctgtccagtgggagtcggggaaagcgggtctgaggtgcgggggacgtggggcgtgccgggatcgcggggcggaagcgggatcgacggcgcctgtgccccgaggggcctagggcgcctgtgcggcagcgctcgcggcccggagtcgcggcggggcagccggggggcgcggggcggaagcgaggtcggtggcgcctgcgtccggaggggcctagggcgcatgtgcggcggcgcgcgtagcaagtttctaacaaggcgggctccaagggtcccggcgcctgttggccggatcctgtgcgagcgcgcgcgcgcgcggatggtgcggggccctccaggccgggccggaggcgcgagcgatttcgcagagccgggtattaggccgcgaagtcgcccaggcggcttccggggagccgagctggggtcagaggcgcgcggggaatgcccgggcgcggtcgaccttctggttccgcacagcctcgccagtagccgagggccgcgctgcggacgagctcagccgaggagcaagcgccccggcgggactggaaggccccgg

SEQ ID NO: 10956 - DNA, 944 bp, Homo sapiens
  source 1..944: mol_type = unassigned DNA
cgtttatagggcgccgcggcggcgctgcagagcccacagcagtccgtgccgccgtcccgcccgccagcgccccagcgaggaagcagcgcgcagcccgcggcccagcgcacccgcagcagcgcccgcagctcgtccgcgccatgttccaggcggccgagcgcccccaggagtgggccatggagggcccccgcgacgggctgaagaaggagcggctactggacgaccgccacgacagcggcctggactccatgaaagacgaggagtacgagcagatggtcaaggagctgcaggagatccgcctcgagccgcaggaggtgccgcgcggctcggagccctggaagcagcagctcaccgaggacggggactcgtaagtggcggaggcccggggctgggggtcgtcgggagggcgggacgcgcgcggcctgggggtgggaggcgccgggcctggagcccgagccgggggaccagcgatgcagccgggcgggcgccgcggcaccccggggctcctgcaccgccccgaacgctgcagggctgcagggccgcgcggggcaccggcccaactcggaggggcggcggctgggccctggtggatggcagcgtcgccacacgccccctccccccagacccgtcctctaggccgggggcggggcggcagcggggacgcgaagtccccggttgcataaggcggggcgggagtttctggccgctggcgggcgccgagcagccgggaggggaagtacagggcgttccgagctggcgggagggcggggcggtctggccggcgcccgccggggccgcggggggaggggggcggaaagtccctgggcgcctgccaggaacactcagctcataataacctcgcggaaaacaccgcggcctcggcctccagaaaccccggccttgcgcaatcccccgcagcccgcgcctccctgggccccacgcgg

SEQ ID NO: 10957 - DNA, 1514 bp, Homo sapiens
  source 1..1514: mol_type = unassigned DNA
cggagccgaatccggtgctcctgttcgcctggggctccgccagcgcgccgtaagctcctccagaaacccaaattctgcaggccgcacccccaactcgtatctcacccaggcccccgtctggcgccgatctgccccagctcaacctccggctccgcagactaggcactttccgggacgcggggcagaccctgcgctcgggtcccttcccgcagccgggctgtccggcctctgcgcgcgcacaacaggcggcacggcgcagcccccgggagcgcgggactcgggtgctagtcccggcgcccagccacagcgacacagacctgggtgccggggcccgccagggagccctgtgatccggggacctccgcgatgcagagaaccagggaccgcgcacggagcccaggcgcgcagtctgcagccaggaccagcctcccgcccccgccgctgaagccgccccgagctccacgcctcccccgctgccgggctcggctgccctagggcctcgtccgcccgtcccagagtgagcgacctccgactcacggagaagcgaccttaccaccggtgcccgacacccagagctaagggagcgagaagaaggcgaagaaagaggcggagagcggtgcactgccttcgctgggactcgcgacttccagaaaccctcccgaaacccagtcccgccgccgccccgccggcagggggcacagcgggcgtccggggcgcggcggctgagcgatggggcgagcggaaagggcccagacgcctggttcttgttcatacctcggagaaagtcttgagcaccaggcgttgggctctctggtcacccctctgactcttcctaccggcgccgagcctgccccactcctctcagccccttggccccgccagccagaggggcgctccgcgtccgccccgccccccacccacgcctcccgacccgacccgcccccccgaatccccgccccctgagaccccgcccccgacccgccccaactggccgcggcggcagccgagccgcgggagctgcgcgctgagctcgcggcagtacggggagcgcccgcccgccccgccctggacccaaccaagcgtcccgcggaggggtgcggccacttgggggcaggagaaagcggagtacgccacccctctagggacccaggaagcgaggcgagcctcaggtggacgcggtggtgtggaccacggcgatcagggcctttccccctgctgtggagacggaggtgcgaggggacgccggcggctccccaccttctggccgagtggccttctccgcctccggctggactccctcggggcgctccctccagagccgagtcgggctggccgggggcggctgtttggcctgagtgtcgtcttactaaagcggaacgccggaggggaggccactccgagagaaggcggtccccggcggaggtggcttcgtgaatcctgcagccccctgcccgcccgccactcgagacgccgcgcctcgtgggtttcacgctggatggagggggcgccgccga

SEQ ID NO: 10958 - DNA, 2144 bp, Homo sapiens
  source 1..2144: mol_type = unassigned DNA
cgcgtctggatgcgtttctcggattcggctccacacaagcctcagccctccggaccttgcacctcccccgcggatctcctcacccctccacccccaggcccagatctttccttgtcggaatcgccacgcttcctcactcctttacccccgccccactcggctctcctcttcctggtcctcatccggccaggctgccccgccctggtagttcccgagggtcgtccgaggctctcgtccaccaaccgcccccgtctggaagaatgcgcccgctcgagcgcactctcggcgggtgccaaagcctcccgcctcaacaggtgcccctgcctggccacgcacagctctgtcacctggggctcggacggagacggcgacaggatcgccccctgcagggcggctgcggctccgcacgcccccgcccgggtccccagagcgccaagggcccccgcagccccgccgccgcccccgctgtgccacactgcctttgtttccctgcccgcttagatgtcgcgaggctgacttcatgcaagggtatcgccaagttcgggcgctgacactgcccacctacccgtggtggcggaccctaaggttgggagtgagagacgcgtacagtgcgagacctctcctcaacccagagaactccggggaagctgggtgtccgcgccgaagaagcgggttcaagttgacccggctcagaagggggttcgaagccaggcgcagcgcctagagagccttcccctacccacgcccccacccgatgtcctctgcccccagaaggctggagaggggctgcgcactgccacctacgcgctcggctgcgagtggttcccaccgcccgctcgccgcgcgctgggcccggcagccttccggggcacacgaggctcccgcagcccccagactcccggccccggcagcgcagagccgggagagccgccacgttcccagccgcgcgcgcacgccgggcccaccaaacttgcagcactttctcccagcccccaccctctgtcaccctcccttagtcggtgcgccccagccccgccgcccggcagaggttgccataacaacgggcaggaatgctccaacatatacaaagccggcccggcgcagcgggcactcagccctggccgggccccgcgccctcggccgccgcgcagggtctggacgcgcgccgcggctccctagccggccggccgacgctcggggcgtactcacaatgagcgggatggtgcggtcctcgcggagctgctccgacctcctgcctgccctctgcgcgccccggccgccggaggatgctgcgtgggctcggttgtcctgccataagtagtagaaagtgcccaggatccaggctacggtcaggatggcgatggcattggcgcggatcttcctcatggtgggcagacgggcgccccaggtgggggactgggccggcgtgctctcggggccggggcgggggcgctcgcagccccagctgtttgttttcgctcgcgcctagctgctcagtcctgcagagcagaaaaaggagagaggtgggggggcgggggggtgatagggagagacaggatcgcggagcgatcctcacggtcctaatgcccttcagccccgagcgcgcgcgtcccccgggcgcccattcattcgtgcgcagggccggccccgcgctccagccgccgccggctgacccaccaggccactgcgcactgggagagaagcgcgccgagtgggaagcggcgcgggccttcctcccgcgcccgggaacccggcgagacagacgcccgcggcggaatggcgactggccaaagccagcctcggctcccaccgctaggtgaccgaacgcccggcagctgcccccgcgcggccctggtcggtcctgccgacccacacccacccccggaccgagcggccttgagtcaccgactggagacgcgcgacccccgacctgggcccgcgccgcgagctgcagttccgggctgcgctctggcgcgggattcaaggtgtgttcggcgagtccttgtgtaggggcggctgggcgggggagagtcctgagtttgtactggaatctgcagctgagattagccagaccgggcccgcccagaggagggattggaagctggtgcacttgacattcgaagagcgcgaaggggaaacgacgc

SEQ ID NO: 10959 - DNA, 379 bp, Homo sapiens
  source 1..379: mol_type = unassigned DNA
cggtgcgggctcgcctcctcccagcccagcttccctgacatcgcccctttcctggggacgttgcctgcgggcccgcgcgtccccgcccccgactcccctgcaggttcctccgggggccggggcaggaccgcactcaccgaggacccgggcgctggagccagcagcagcggcacgagcaggagcagccgcatctcagcctgcgggagacgcattgggttagagcggcccggggctcccgcagctgtcctgggcgcgggcgagagtgtgtgggcgcgtctctccctatggcccacaggtgaccaggagacccgcaacaggacagccgggtgcgcctcggtgcaccgcagagaacacagcgtgagggcgccccgccgggcgg

SEQ ID NO: 10960 - DNA, 637 bp, Homo sapiens
  source 1..637: mol_type = unassigned DNA
cgccgccccactttcaacaagccgaagcctttgaaggaggctcggtgccatctcggtgtgatcgcgtcccggcgacgctgggtagggtgcagggagccagctcggccgcggctcagcgggaggggagggggccggtcccgaacccgggcgcccgggccgcgggtgattcactgggaacgccaggttcgcgcgcctagaccggcgggcgacgcccagcgcgccccacgtcccccgcccgggccgttcgcgcagaagcagcccccgcgcacccctgctccccgagacggacccgtcgggaaggagcctggagtcgggcggccggcgggcagcaacctctccctcctcagccaccatggccggtgcgactccctacccgcgcccgcagacggacttcctggaaagcaccgggctgggcttacctgactggcgcccgcaggggccgccgacctcttcacagacccacggaaactgccggccgcaagccgaggctcggttcccagcacccgccggtccgcccgcgtcggcctcccaaagagttgccagacccacccgccagcagctccctcactcgaccgccctgtaggtgcggtgggttcctccttcgcctccgacgcgcgtgcgcactcccgtgccgcgg

SEQ ID NO: 10961 - DNA, 959 bp, Homo sapiens
  source 1..959: mol_type = unassigned DNA
cgggagtggggcgggcaggaacgagggcctgagcccaggaccgcaatccccgtgaggggctcgaggaccccagcccaacgccccgccgggccccgccctcacctcctcctccatggcgagtccgccgaggtcccgccgctccgccactcgcttccagcgccgcgcgggctctgccaccgcgtctacgcccggccaggcggcgactctccgcgttctgtcccgccggctgccgggggcccaagaaacttcgggggggcggggccgggggcggggtgaggcttccgggggccggggcggggccggggagggggcggtggggccgggggcccggcccagggcgggaaatgggtggggaggggcggggcctgggttggagactggacggaggagccgggcggagatgcaactggaggaagagggcgggacggggcggagaaggtttcccgcatcggcggagggagagggactaggagggggctgcggcgggggaggagagggggcttccggcccagagactgaggcgagggtggcgggagcggcgcgcaggcagggctggggtggggcgcacacagtgagcgctgggggcgctggcggtggagcctttgaggtctcccgaaccagtgggctggggttgcgagaccgagccgagctgccctgggcggccagagatgtgggcacacagaggctcctcctctttcctccccgacgccgggcagtgggcggtggcctggtcttctccctggaacctctgggcggggccgggcctggagcttgggtctctgtccggagggtggtgtcacaggaagagctggagctgagagtcgggactccggggtccctttagggggcggcccgcccctggctctcaggggtctccaagcgcagtgttctcctgctctccttgggcatcgctcaatccctcccgtatctgagggtcgaccatccccccgatcccgcgg

SEQ ID NO: 10962 - DNA, 826 bp, Homo sapiens
  source 1..826: mol_type = unassigned DNA
cgcccatccctgcggcgccgtgaaagaaggcgcaggaggagggagccctgacacctcctctcgggctggggccccacagcggcgaaaagacggagggagtgatcgggggtcgcggggatccttccgggacgggcctccgtcggaggagctccggaaagccgccctccacctccgaggccccgcctgcgcgggcgctccactagcggtcggggtggtggcggcggcggcggcggcggcggcggcgcggggcggggcgccgcgacccctgtccctcccctgggccgagcggcaggcgcgctcgcaccgcccccgccccctcgtcgcagtcgctgccgaccggctggctgggccttgcggcgtgaggaccccggcggcgccgcagtcccgcgagccatggcccagtccggcggggaggctcggcccgggcccaagacggcggtgcagatccgcgtcgccatccaggaggccgaggacgtggacgagttggaggacgaggaggagggggcggagactcggggcgccggggacccggcccggtacctcagccccggctggggcagcgcgagcgaggaggagccgagccgcgggcacaggtaggcgcggcggctggcccgggaggtgggccccgagggggcgccgggccgcgcgcgagttcggggcgctgactgcgcgcgacaactcctcgggcagagggggttgagtcagccccgccgccggggaagcagctccgggccgagcccctgagtcagaaccggcccgtggaggcagccggtgccccagcccgcagcttcgtcgcccaaccgaggctcccagggctggcggccgg

SEQ ID NO: 10963 - DNA, 2156 bp, Homo sapiens
  source 1..2156: mol_type = unassigned DNA
cgtccgaggaaccggcccaaccgctccccgctgcagccggcttgtccctttctcggaactaccgagggagaggcgcgtgcggaggtcggcgttcggatctcgcatccgtcactgttgccggcgcatttcctcgaagtcttacctcgaagggctgggtcccacccgcgcgccctgtgcgtgtctccctgtttccccacgccctccttgcctggctgctgcgaggctttgcaggggaaagactggcgcggggttcgcaccctgcccatgtcacaggaaaaccgtgggagcctccccgacgcggcgcatttccggaagccccctctccaggagggttgcgggaaggccgggactctgcatccagacgaacccggtcgcctcccaagaggaaagtcggagacccagctgaggggcaaaaatgccagggaaaggcgagcccagagcttggtgatggagaaattgggaagccaccccccacccttcaatcttaggatggggaattcgcaactgaagccggagcttcagacttggggcgcactcccagcttagcccaggaaagagatttaagggcgcagcagtgtggatacctctcaccccggccccgaaggtctagcgagggtctaacctgggccccttgccaggcccgccccccgcccctttccagcccccggcccgtgcgccgctgcccctttaagaagcccaggtaggcaggcccggctgctggagccgctcctatggcaacccgcgagctgcggcggcttcatgaatattccggggcgcgggagcccgagcgctgccggagggcgcttcgggggaggcggccgctgatgtaagcccggcgggtcgctgggctccgctcggttgcggcgggagccccgggacgggccggacgggccggggcagaggaggcgaggcgagctcgcgggtggccagccacaaagcccgggcggcgagacagacggacagccagccctcccgcgggacgcacgcccgggacccgcgcgggccgtgcgctctgcactccggagcggttccctgagcgccgcggccgcagagcctctccggccggcgcccattgttccccgcgggggcggggcgcctggagccgggcggcgcgccgcgcccctgaacgccagagggagggagggaggcaagaagggagcgcggggtccccgcgcccagccgggcccgggaggaggtgtagcgcggcgagcccggggactcggagcgggactaggatcctccccgcggcgcgcagcctgcccaagcatgggcgcctgaggctgcccccacgccggcggcaaaggacgcgtccccacgggcggactgaccggcgggcggacctggagcccgtccgcggcgccgcgctcctgcccccggcccggtccgaccccggcccctggcgccatggacaagctgccgccgtccatgcgcaagcggctctacagcctcccgcagcaggtgggggccaaggcgtggatcatggacgaggaagaggacgccgaggaggagggggccgggggccgccaagaccccagccgcaggagcatccggctgcggccactgccctcgccctccccctcggcggccgcgggtggcacggagtcccggagctcggccctcggggcagcggacagcgaagggccggcccgcggcgcgggcaagtccagcacgaacggcgactgcaggcgcttccgcgggagcctggcctcgctgggcagccggggcggcggcagcggcggcacggggagcggcagcagtcacggacacctgcatgactccgcggaggagcggcggctcatcgccgagggcgacgcgtcccccggcgaggacaggacgcccccaggcctggcggccgagcccgagcgccccggcgcctcggcgcagcccgcagcctcgccgccgccgccccagcagccaccgcagccggcctccgcctcctgcgagcagccctcggtggacaccgctatcaaagtggagggaggcgcggctgccggcgaccagatcctcccggaggccgaggtgcgcctgggccaggccggcttcatgcagcgccagttcggggccatgctccaacccggggtcaacaaattctccctaaggatgttcggcagccagaaagccgtggagcgcgaacaggagagggtcaagtcggccgg

SEQ ID NO: 10964 - DNA, 1441 bp, Homo sapiens
  source 1..1441: mol_type = unassigned DNA
cgtaaggaggaaaacgtggaatcgaatacagtagctgcgggaccgcaccacgtgatcctcctcccgcggtcgctccatagaatttgtgggaaggggggggagggggagtgtcgccgcaatcccgaggacaggtcagcagcccgcgggtccgactccagccggcgttcccggggttaccacaccccctcgccggcggggaaaccatactccttacacgcccgaagtcgccgccccctcgacacggctcgcccggtcgcacgcacacgccacgggccggcgcctcccggcacacgcgcgaaggccgggccccgcctcgctccccaccgactccgcggagcggcgaccaccggcctcaactagccccggaccccgggcgcgctcgggccggtcccctccccggcccagcccccgctaatcgggggatccattccgctgaactcgcccactcgggagggcgcgccttcgcctcactgctctacacccgagggcaacagcggtcgtaccgctcacctgggtcggggggctcctccctcgctctcggccgactgagccgggctggggccttcgaggaagcgcgggccgccgggcggctggaagtgggggaaggagaggagggggagggggtcgggataccgggagccgcctcctttctcctccgccgactgcggctcccgcaggctggccgggcgtcctcgcacactcgcccagtttctcacagcctcgcgtcccgtcagcttctccctcaccccactcccacacactctcactcccacacactcacacccggccgctcctcgttccctcactcgcctgccgcgcgcgcgcgcgaccccgctcacacacagcgcgcgcgacgccggcggagaccgccccgctccctcagaccgaacgccgcccgcccgcttgctgaggagcggcgcgcgccccggccccgccctcctggcgccgcggcgcggcgggcggggggcggcggccggaggagctgggggccgggccagcgcgccgagcactgccgagcggatctgacacctgcgtcgagagccgccctcccagctcctcgcccgcacccgagccatcgctggcctcgggggaagagaggcgatggatcgcgcgcggggagcgaaaagggagcgcgagggcgctccgaggacgcgcctccccacccgcccccaaaccgtcttcactgagaaagggaaacggatggggggggtggggggcgaggtttgctcccaactcgaaaccgcgagattagtcccttccgttgtacgccctccccgccctcacattccctgcttaggccccatcaatctgcgcctggaaccccgacacgagccccctaccccctcgggcgcagggtcctgccggcatcccgacgcctcccgcccagcccttccgccggccgccgcccggagtctccgcttacggtggttcctccctccgg

SEQ ID NO: 10965 - DNA, 734 bp, Homo sapiens
  source 1..734: mol_type = unassigned DNA
cgggccccgcccgccctgtctgcgggccgactccgcgacgccgaccggctcgcgcctccgcccccgagcgccccggcgggcggagttgcgggtgaggggggggctggtttggggggcgggggtcccgatgacggcatcggagcgcgccgcactggggatggaaacctgactgcctggcccgggacggcgcttgcagccaggcaggtgagtgtgggccggagagcgggttaggggcgaggaccgggtgggtggagggaggcgcgcgctccctcctcgcgcaggcctgggcctagtggccctgggagccggcactcctgggagacctgacccggcatgaggagcccggcacccttgctccccagcctcctggaagctcttccttggactggccggcgccgtcttcccgacatctgggggctgaggccggcatcccgggcctgcgtggaggggcgagcgccaaggctgcgagagtcgggtcccgatttgtaatcacttcttccaactttcatggagctccgtcccgcgcccgccgcctccagccccagctgccctgccccggctccgaatagcgcctgcggggttgtcagagcaccttcggagcgggagcgctgtgcggagagcaggggcgcgcggaagccgggactgcaccgggctcggaacgctcacgcggaggggtgcgcgaaggcccacacggtattgcgaggcagagtttaccgctgtgtgcccagggtcgg

SEQ ID NO: 10966 - DNA, 935 bp, Homo sapiens
  source 1..935: mol_type = unassigned DNA
cggcggtgtccagggggagagggtcccagcgccgccgcttcccaagccgacccgtccgcacctggtcccttccccacagggctggagcctggatgaagtcccccacccctgccagaccccagccggggggtcggcgccgcgaggtccccatgcgcgcccccaaagttgccgcgggggaggggctactccccgcccggggctgagaccagccgagccccccgcccctgcccggcccgctcacctcgggcgcacagcgccagccggagcagctccagcagctgcgcccccagctcgcacgcgtccaggcccagcatggcggcgcgcggcccgggcgccgcggagccgccgaggagccgccgcccgccccgccgccgccccgctcggcgctcagccccggcgcgactgcggtgagctcatcccggccgggagcgccccccgcgcccagccgcgcccggcagagagcccccagccgctccggaccccgcgcagccccgcagagacgcgcgtgtcgcccgcacgggccggcacccgggtcgcccccgccggcgtgccaggaccccgcacagaagcgcccggacgcggacgcacgcagccgcggtcacgatccccgccgcccgcccggcccgtgcccggctctggccagcagggctgccccacccccacggcgcggcgggagcccgagggggtctcctgggaaaccctctgcggggcgccgtggcgcaggtgcgcccccatccccagggtctcattatccgcggccacacctggggccggaccgcgcgcccccttcccctcccccgctcctgagggagcttctgtctgggccgagggggactccgggggcctgcccagccttggggtgaggggctggcccaacaccctacaggttcacggtcatcagtagggcgggaccacagtgggcgcgggtcgcacgc

SEQ ID NO: 10967 - DNA, 1054 bp, Homo sapiens
  source 1..1054: mol_type = unassigned DNA
cggggtgggggatattcgggctgagtcagtcaagccgggagtgtgaggagcagcgggggccggcaggaacgtggacgcgagattggggagcagtggggctgcctgtgcggggatgcagctcccaccaagcacacgggtcgagggctgaccacaggcagagcagcgccttctggcagcgctgcgggtgtggatgagggaagccaggccccggacccatacccagacggccgctcctcagcctgtcccctccctcctgtgggctctcaaagtgcggcttggtttctccatctcgaccctgaggcctggaggtggggacgggactgtgggcgccggcaaacgtgagctcccgagcggggcgggaaaggagccccgcgaatgcctcccccagccccggcgctccacgtgcaggcccatgactgggagcgttttcaacctaaatcggcactgcgccgggattattcctcccctggcgccgcccccgccgcctcctccggatccttcccggcttctcccccactcttcgcccccggggcccctccctgctgagcgggggctgccgggatttgggattgcggggctgccccgaccccgcagccgtccgcggtggaagccagcccgggcctggccctgagcgcgcggctggggcggccgctgtccatggtgctggcgcgggtggcgcgccggccggcggggtctgcggaggcccaggcgtccctggcggggaaggcggcgcttccgggtctggggagcgagggtccccgctctaggggcacggaggatatttagactggggcgcccgtgggcctggtgctgccgcctcgggcgccggcatcctgcgatatcccctctccccggctctgggagggaaccgaggcagccccgcgccaggcctccccggacacctggggcaaattcgctcctcagagcctcgtgttccttccccaaacctgaggtagcgacccctccacccctaagggcggccgtgaggtcgaatcatgtgccgaccccagccggcccttgcaaacgttgtgatgtcggcctccggaggccgcgc

SEQ ID NO: 10968 - DNA, 1474 bp, Homo sapiens
  source 1..1474: mol_type = unassigned DNA
cgccagcgccgatgctgctgtctccccgctccctccacttccacacactcccacccgggtctccgcgggctctccgaaccaagccctcagcccagctttcccaaacagcccacacagcgacacgggtattgggcaactgtaaccagctccaaccggaagtacctgcctgtgggtgagacccacctgaccctcggggccggccgccataagggcgagggctgaggacctcccgtgggggacatgggctccccaccagccggaaagctccagcgaccggctgggcgttcctgggccggacccgcgccgccgcccgcgcactggggccttcgaggtgtgatgtcacctgcccgcagaatcggcccccctcgcgccgcccccctcgcgcccccaccccagcctccctctcgccgctcccggggctaatatggcagcggcgccgccgccccacccccgcaaccgcacgacccggctggcagggccgccggcccggacccccgagactcacaccccggccaggcccgcacgccctgcgccccggacccccggcggctccccgcagccctcggggcgccgacccccgcccgctgtcacacgaggcccgggcgcccccgacagctcgggattacgtcagagtgacgtcacacaccggaccccggcgagctgcgggcatgagcaacgcgcgcgcccccgcccccgagtccctcccgccgccgcgctcaccgctgaagaccatggcggccgaggcgcccatgacggcgaaaaacgaagcatactcggggccgctcttggactcggacatgtctgcgggtggggagggggcaagctctgcgggccgaggcggtggcggaggcgggggcgaggacgggccgggcacgaaggtttgcgggcgggcggcggcgaaggcgatccggcccgtcagccgctgcgctctaaataccagcaccgcagaacaaaatggcggccgcggccgcgtcacatgacctgggccccgcccctgcgagccgtaccacttcgcaccgtgggggagacgcgtccccgggacgcccggccggcccgttgacctcccccgggctgtgccgcccgcccagcgacccggccccggcgcccggccccgccctgcctcggcctccgcgggtgtttccgggcgccgccggcctctggatctccgcagcgttggaccggtctcgcgccggggcggggcggtgtggtgtgtgcttcattagcatacggggcggggcctcggacgccccgcctcctctgcggctgcgcgtcgtctgcaggtgttgggttcccggcgacgcttttctttgtacccctggcgtgaagctgcaggccgtggtttcgcggccttgcccccaagacggggcctcacccctccgggcgctggtcttccaggatctccctaccaatcctgggcgagctaagggtcccagcagatgtgcggcgcgcgggcctcctctgccacagcgtccgg

SEQ ID NO: 10969 - DNA, 357 bp, Homo sapiens
  source 1..357: mol_type = unassigned DNA
cgggagaccccgagatccccggccggtgacagcaggcgaccccctgctcctgtcaacctgtgggtccctacggacgtggggaagggaggagggaggccccagctccctgcgggggaggggcgtgaagacgcgcgggggtggggggagatgagccggcgtcgccatgacaacgaggccggtggtccggccttggggacccgggagggagggaggcgccgtggccgcgcgcgcgggcgggggcggggggccaggtctcccaggagtagttggggaacacccggcgattctggcggctgcttcctggtggcgcagggagcccgcgtgtttgcgagtgcgtgtgtgtgcgaagttctccgg

SEQ ID NO: 10970 - DNA, 814 bp, Homo sapiens
  source 1..814: mol_type = unassigned DNA
cgccgtccaagagcctggggccgtggggggcggggctgcctgctatcggccccgccccgccgacaggacccgcctctctccccaggcccggcggggccgaccccgcctctcgctcccagcttgccgtacgacagcggcggcgcggcgggcggagccgggaggcggggaagcagtggccgtgtgagcgtgaggagctgccgccaccgcctgctcctcgtcctcctcgtcctccggggccccagcgtcgtgggccgcgcacggccctggaagagacgtcgcctcgccttcatccgcctctctcaccgcgccgctccctcgtcctgccctgcgggctcaggcggaacccggaacggccgtcctcttcccccgccctccgccgccgcctcctcctcctccttctcggcttcctcctcagccccgggccggagcggggtgtcggcggcggccggttcgggcggcggcgcttggccatgtcgtgtcggggaaggtaatgagccgcagagccccggggtctcggctgagcagcggcggcaccaactattcgcggagctggaatgactggcaacccaggtgggtgaccggcccgggaccccgccccgacctcccgggctccgcctcgggcgggccgaggcctagggccgcggggctgggaggcgcggcctaggccctccacccaccggagccgggcgcggcttcctgggtctcctcctccccggctaggggaggaaggccgcggggaggcgaggcctaagtgcctctcccctccctgcttgttcagcccggggctgaagccgagccccggggctcccggcgg

SEQ ID NO: 10971 - DNA, 847 bp, Homo sapiens
  source 1..847: mol_type = unassigned DNA
cgtggtgagacaccgactccgcagagcagagggggcggcggcagaggggaagggtccccgcactcactcttcttgcaggaggtgcatttgcatccctcgcacttgcaggagtccgcgcaggtgcaggagccacctagagagggcgacgccacaggaagggttaatgtggacgaactcgggtccccacgcctgtcacgaggagatggggtgccaagtctccctgttctccgcgacacaggcatgcccgcccttcacgaggtgaagaatagggaatcaggggcccttcccccaagtgtccttgagcgaaggcgcagggcgtgggtttctttgcaggtacaagggcgcgcagtgcgcaggatgcgagcgggggcgggggctcaccagaagggcaggggcaggtctcagggtccatgtcgaggagagcagcagctggaggcggtgaacgggcttctccaagcaactggacgcgcggcttggctagtggcagcaggtggcgatgcttttatagcctcgggcgggggcgcgcatgccaagcccgctgggcgcccgcccctgcgcaccgcgcccgctctttccgtttgtgcgcttgggctccggcgcacgcactgcatctgtcgcccgcccctgccgtgtgtgtgcactgccggggcccgctcgcccacgcccgcgcgtgcgcccccactcccaccccgcatccgcgtgcacgacccactcgccgccgctgtgcgcgcactgccagcccactccccgcgtgggtcccgcaggggacgtgctcgccgcagcagccgccactgcgtggaagcgcgcacgtaccatctccgaaagtggagaaaaaggcgctttgcgt

SEQ ID NO: 10972 - DNA, 589 bp, Homo sapiens
  source 1..589: mol_type = unassigned DNA
cgtgggtgctccggaggaaacggccgcagccccaaatctcctagtctctctagcagggagttttcccgcggagtctcgcctggcggccggaagccacctcaagccgcccacccggaagccgtcgtcttggcaactgggtatcgtcccacccccttttcttagcaacgcctatcgccttagacgtctgaggtcagccgagcctcgattggttcctctgtctttcactctgggagacgtttgagacccagcgtctctagatctcgtatttgaatttgtggcgcttggtgtccgcgagttgccgaatgaagctgagcgtctcagtggaaccagggatctcaggggtgagcgaccgcgaggggagagcgacgaaaagggcggccggagctggaggggcgcggagttaaacaaaaaagggcggccggagctgcaggggcgccgagttaaacacgtcatttccagatggggggcttcaggcgagctgcttagctcccctgaggcaggccctccgtctgttcgccttttcgtagcctctgagtttttccctcacgtcgttttccggcagtcccagagacgccacgcctgcccccgt

SEQ ID NO: 10973 - DNA, 848 bp, synthetic construct
  misc_feature 1..848: note = Description of Artificial Sequence: Synthetic polynucleotide
  source 1..848: mol_type = other DNA
ayggggtygtattygagtyggyggagtatttttagggagggggygggaggttttttttgtttagtttygagtyggtggtgtagygttygttttyggtygygggygtagattggyggtygttttygggttaygtggtgygygyggygggygygttygaggagtttgyggttgtttttggtttatagygtttygggygaggagagygggyggaygtygggggttgggtyggtgygggyggygaggtaggyggaygaggygtagagatagyggggyggtyggggygyggtagtyggyggygtyggggtygyggtttttgttttgtygtttttttygygtyggattttygygtttagggygtayggtggagagggaygyggyggagtyggtyggtagttatggaatyggtttttttygtyggygtygagttgtagttttygtttttygttaaygtttyggaygtttattttagygtttgttttagygttggygttaatgygtyggggtygttaggygygyggagygtttygtttttygttttggtaatygttattatygygttttattyggtygtgtgygtygtggggttgttgggtaaygtgtttgttatgttyggtatygttyggtgagttygttgygggtyggygtygtagggttggagttyggggtgagggtggggattaygaatttgagattttaagttygttttttggatttttygygttttygtattttttgtaggggtatttggggtttagygagaggygaggttatttatatygaggggaatataggaatgtgtgttatygtgtgtatgtgtgtgtgtggtgygggggggggagtgygtygyg

SEQ ID NO: 10974 - DNA, 1230 bp, synthetic construct
  misc_feature 1..1230: note = Description of Artificial Sequence: Synthetic polynucleotide
  source 1..1230: mol_type = other DNA
aygtagtttygagtttygagtttygtttygggggttttatttygttttttygygttygyggttygtttttttttattgagygtttagttttygtagttttttyggtygtygagygtygtgggyggggttttagggyggyggygtttygyggggagggtttttygtgttgggggygaggttattygaggtagtttttygttygtttttaatttygtttygttttyggagtttataaagggaggygattygyggttygttyggttggtattttttagtygtygttagtttygtygaggggagttagygtygtttttgaggggygttyggygtyggagttatgatttttygtygatttaggaagttgtagtagaaggaggaggyggyggttatttyggatttygtygttyggattttygattyggaagtygygttygtygtttyggtttygatttygggattttttgtygtagtygttatttttgggtttttagyggaygagttgtaygyggygttggaggattattattttgtygagttgtatygygygttygtygtgttygggggtattttgtttygtygaaaggtgygtttttygttygtttttaggatttgtttagttttttttygattttttatagggtttgttgatttygtagtgtttttttttyggygttygyggagttttttattttttttttyggttygttgggtgtttygatttttygygtttttygttgttgygaaggtygtggttttygtttgtatatygygtttaggttyggtggtttttaatttygygttttatgtaygttttttttttttttttttgattttttttagtatttttttttttttattygttttatttggttttttgttttttatgtttygttttttygtggttaggtgttttgggtttttaggagtttttygttygagggatagagatagttttaggtaagttgaaggttygagagttttyggtgggagaagygggtyggtggttgygtygygtgygtttttattttgaggaagtgygtggggagtygttgatttyggatagtatattttttygaggggatttttygatttttgggttgggggtttgtygtttggttttaygtttgaygtayggggygygagggttattgttttttggatttttgtyggaatyggaygtagtgggaggggtygtagggygttygyggggtaggaaggatgygggtygyg

SEQ ID NO: 10975 - DNA, 1094 bp, synthetic construct
  misc_feature 1..1094: note = Description of Artificial Sequence: Synthetic polynucleotide
  source 1..1094: mol_type = other DNA
gyggygttaaaaatagttggggggagggtgygggggyggyggagtttgtaatttaagtygttttagttttyggggggtagatttygyggtygtyggtyggygttyggtttttttagtattyggtttagggttggagttggttgtagggttggttygyggygatttgggtagggtggyggttgttttttttttttttatttygtttygaggygtagygygyggtagagyggttyggtgttyggygggygggyggttygggygggtttgyggtygggatgaggayggygttttygttgtagagygttggggyggygygggtygggagttygttggyggyggtyggygtggygggyggagygggtttyggagyggaggtgagtgyggatgygtygtttgggygygygyggtgtttggggatttygggttggaaygyggggygggggtgttatygggttgygygggggttttyggttyggttttygtttttgygttttygggggtygtttttyggyggggtyggatttttttagygttygyggygttyggttyggttttttygatttttttttttygggttyggaygtgyggggtagygagygtyggggttyggygggggtygtagttttgttyggagyggagygttggtagygyggggttyggtttygtgggtagtttgggaagygttygggtaaygtattggygagggtygyggagygaggggttyggggagygggattttygggyggggttgyggggagyggggttygggtygttttatttatygyggatyggagtygggggtgttttagtygtgtygtygtttttttygggtygttygttygggygtgttggtttygyggygtttygagygyggtataggtttgygagtyggyggtgttagygtttyggaygggggtgggagttttggagtttattttgggggagattaygtygtattttygtttagtttygygtatttttagaggtttttgtagagtygggaagttggttggaygtttagattygtggggaygyggygtttygygtggyggyggtyggaagggaaggttaatggggttygggggattttygyg

SEQ ID NO: 10976 - DNA, 1979 bp, synthetic construct
  misc_feature 1..1979: note = Description of Artificial Sequence: Synthetic polynucleotide
  source 1..1979: mol_type = other DNA
tygttatygttatygttttttttttagttattttttatattygttygtttattttttttttaatattttttatayggttgttygtatttttgttttttttyggtttaygygygttttttgtaatttygaygtttttaggtttttagttygtttttttttttyggttyggagttygagagtygtttgtttttattttaaaatagygataataatagggaygttgagaataataattaygattagtayggygaaggygtttttttygygggttagaggtyggygttttagtttygtagaattyggygttyggttagygttttttggtagtttttttyggtagttttaggtttttaagatttgtaggttygtttygaagtttttygttygttttttayggtygtttygagttttygaggttygtttyggagttttttgttygttttttayggtygtttygggtttttayggtttttaggttygtttyggagtttttaatyggttttttagagtygtygygggttttyggttatttaggttygttyggagttttygttygttttttayggtygatttaagtttygtygattttttaggtttttttyggagttttttatgggttttttayggttatttygggtttttaaagattttyggttgtttygaattyggattygtaggttygtttygggatttattattggttttttaygatygtttygggtttttaaagattttygtttattyggtttygattttttaggttygttyggaggttygyggygtagtttygtygtyggggaaggtttgtaggtygtaaggtygygygaatgtttygtgttygtttygattatygtttttagattagyggygttttttatygtgtttygagggttgygyggtttygygayggtttagyggyggggygygggygttgtttatgtagttygyggtygygtttttygggtygygyggttygagyggtaaggyggyggyggyggyggygygggttygggttyggtagagttgygagggayggygggaggygagttygtttttygggygygtttayggttygggygagagtygyggttttyggtgyggaygttattgatggggygtttggtygygggttyggyggyggygttttttyggttggggttttyggtttatygygtatygttttagggyggtttttggttttaggatttagyggyggttgyggygggagtyggtygtatgagaygttttygtttattggttygtygtattygttatygttattggttygtttyggtyggtygtaggggttgtgtaygttatagygtygtgagttagtgygttaatggagtgaaggagagaggygggattgatagtttttttggyggttyggaggygggattaggaggaygtttyggtaaygattgggtagggttttgygtaagggygtatgygatattggaagtagygagtaattggattggttgttttygtygtaaaggagggtgggttttgtattttygggtttgaygattggtttttttaagtgtyggaagtaatagggatgtygtttggaaataaaatttggtattgaagygtagggagataaaaygtttatttttagagtygaggyggyggttgtttgtygygtgttygtggttttttgtttgttttyggatatttygggttaygttyggttyggttttyggtygygttgttttaaygggygttayggggtatgaagagttttgggyggttgygaggggagggtatyggggtagyggggyggtygttyggggttttygygyggtgatttttgttttgtygtygaagagaayggttttygggygygtygyggtygyggttttagagtttttgggtttygygttttgagagtttgagtygtttgaggaggttaagygtttaygaatygtattttttgttttgttagttagttttttaataygygaaaaaggtagayg

SEQ ID NO: 10977 - DNA, 1930 bp, synthetic construct
  misc_feature 1..1930: note = Description of Artificial Sequence: Synthetic polynucleotide
  source 1..1930: mol_type = other DNA
tygtttaggtagygygttgtttygggtttyggtagggtggggattggtygygaaggttagagaaggtaatggtaggggaggttagtttttgtygygggtyggttgtagagyggaygtttygttttgttttyggtttttttttygttygtygggttygtygtgtygaataattgttgttyggagttttygtgaygyggagttttaattgttgygattyggaagaagygaaaaggagtttttttygtttygtattttgagygttygggygtgtaaaygtgggtggyggagagyggttgttttttttttttttgtttttttttttttygyggygttttygtgtgtgygggtgtgtgagtgygtgtgtttttttygtttattttygtataygtttyggtattagtgtaggyggygagtyggyggtttttygttygttygtttyggtagttgygttttygtttygtttygtygtygtygtygtygtygtygtygtygtttttgtagtygtagtygggtatggtgagtgagtgaggtttagtygtygygygttttttyggttygtygtyggattttagttttaatyggtttygttttagggagttagtttgyggygggagygygttgyggggtygggyggttgggggattygggyggtygagttgygtttggaggggyggttygtgygttttyggttttaggygygtagggtygygggatttygttttgggagygggttttaygtttttttyggtttygagttttttttttygagggttgygygtatttttttygttygtttgttygyggttttttttttgttttyggagygttagtygttttatttygtgatyggtttttygttttgtttygtaggattygttyggaygggattaygtygtygtygtygtygtygtygttyggagtygygtttygggttttgtttgagtygagtygygygyggggtygtagttatygtyggygggggatggggttgtttaggaggygygtygagttygtagggggagygyggagtyggygygtagtttgagagttygagtagttygygtygggtyggttygtgygtatygygygtygtygtygttattgtygttygygtttygatggygttatygtttyggagtygttgatygtttagygtttttagttyggttygygyggygggtttttygagttyggttygtygggggagyggtttgtygyggaagttttttygygttttttygttyggtttygttatggygttgyggygttttttgttgttgttgttgttttygttggagtttttggatttgttgtttagygtttayggagttygyggtygygtygttaatyggattttgagtgtaggyggygttgtygtygggggtyggagggtygggggygttttggtayggggyggtygygagttgaayggtatygttygggygttyggaatttyggaggygggaagtyggygggggtagttygyggyggttgtggyggyggyggttagygyggtygttatttaygagaygtgttggggttattaygaygtgagyggttagtaygataaggagttygagtgtaataatagygagagyggttatttgtattgttgyggtatttgttattatygtttttgttgtaagaagygttaygagaagttggattagygttagtgtattaattattagagttyggtgtgggtatagaygtttagtattaaggtggtgtygtyggggttygagaataagtaygattyggagaaggataagattaattttatygtttatattatttgyggggtgatygttttygttatygtggtyggygttttygttaaggttttttaygataaggtttatygttttttaygggagatgaatatttataggtgagagygtygygtgtygygygtttyggttttttygyg

SEQ ID NO: 10978 - DNA, 3177 bp, synthetic construct
  misc_feature 1..3177: note = Description of Artificial Sequence: Synthetic polynucleotide
  source 1..3177: mol_type = other DNA
tygygttagtttyggggtttttattttggygggaagggtaggtygattyggtagattgyggtttttygggagggaagaaggtgttagaygygyggagtaattataaatagttttttttttttagaagayggtayggggtttaagatttaggygtygtatatttagaatgagagtagagattttygttaggaaaaaaaggtatttaggggatttgtttattagtatgaaatgtaaatgagttygttyggttttatttatataattttgtgtatggattyggygaaagggtaattagggagaygayggygtagtagttattttgttattttttttattttttttttttatyggtyggggygggaattgagaygattttaattttttgyggtggygggaggtgygygggggttgygtgggtggtgtagttttaggagagtgaataaygtttaggggtgatggttttagtaaagtgaggggtggtgatggaggttattygatttatttygtygttttttygtagtggygtaagygttttaaaattttyggagagggaattgattgatttattaggtttygtygtgtttatttttygtagatgttggggaagtgtttttyggygtttaattttygttgtttttttttttatyggygtttagtatattygyggygtttygttttygggtatttatagttttttggagtggygtyggyggtaggagagagttagagtygattgagttttagaattyggggaggtaggyggggtaagggtyggggtttgygygtgygtgtgtaygygtggaaagtataaatttaygagggttygttgtyggtagggttaaggtgagtgagtgaaggyggtagattygygaagttttagtttygyggatattttttttttaagttatatagggatttaagagaaattgaggtaygaagttggggggtggyggtggtggggattttgaaggtygagtygataaagtttagttttgtgttttygtttttttttatatattygagatttttataggtttttttttaggggttttygttttgtttygtagttttttttggggattygggttttgyggtttagygygatttgtttggggttaygtgtttaagtaygaagtttttgygtggagtttaygttttttaaaaggtttttaggggtaaagggatgaagtttaggagygttaatgtgaggttaggtttagygggttagggttaygaggttagggtygaagttttagaattgattygggagtatgattaataagtttaagagatttgtggaggttaygtttagattatgtttattttagtttttttygagtttygttygtttttttaagattgggtttttttagtttgaagttttatttttaggatatttagtttygtttttttttttttttagtttygtagttaagtttaattttagggtgggagattaattaggtggagatttgggatttygttttgggattttttggtgataatttttattttygtgtygtttgtttttttttttttttaggttygtttagagttgagtttygtttttyggttgttgtttaaattaggggtygtggataaaggatgtttggggtttgyggttttaygttaggatttygygtygaatattttgatttttygggttttttttaagggagttttaaagattttaatggttaataggaaagtgggttyggtttgggtagtagtttgattggttttagttttygggagyggatttaggggtaaggggaggggagaggggyggttttgggttttggggtgggaatyggattttagttgtggttttttttttgygttttygttygtattgttayggyggayggttaatgggygygyggttyggggtyggyggygttyggygattggttgyggggttgtttgggggyggggtygaggtttgaagttgaagtgagggatttagttgtggtgtgygyggggtttttygtygtygttttygttygttygtttygygtttyggtyggaggaggaggttgtggygtyggygatagttayggtagyggtagttatygyggyggttgyggyggyggtattttygtttttattttygttygggattgttttttattgttttttygtttttttyggatagtgagttygyggyggggygggggaaggagtygtttttattttttttaagtttatttttaaagagatttttttttttttttttygtygtttggygyggagtygggaygatgttgattttttagattyggttttagttgygtygygggaagagggggygttttttttyggattttygtttttygtygttgttttttttttygttygttttttyggggyggtttygtygaaggtagygtygaattyggtaatyggagtttgggygygaagygaagaagtyggaataaagtgagggggagtyggtyggttggttygggaagttttaggggygtaggggaagygggattygygtygggyggggtttttttgygtttyggygtttygygggtagtatgtttttgygggtagggggagttgggttgaattggttttttygggggtttagtttgygttttagagtttattagatgtgttttygtyggggttttygggttgygtgaggatattttttttgaggggygtygtttgttttttttyggatygttyggggtttyggttggttagaggatggaygaggaggaggatggagygggygtygaggagtygggatagtttyggagttttatgyggtttaaygatttgtygggggtygggggtyggtyggggtyggggttagtagaaaaggattygggtagygyggatttygaggyggaggggttgtygtattyggygttggtttyggtggtttttttttatttgagttaggatagtygttygyggagttggtgttttygtayggtttgtaatttatatttttyggggtaygayggttaggygyggggttagaagggggaygggtygtatygtygggggtygggggggaagaagatttatygttaggtgagtygaagtgagttyggagggtaggyggatggggggggggttgttagggaggggagggggtattagagtgggagyggagaygygagtaggtttygtyggtaattygggtttattttatttgyg

SEQ ID NO: 10979 - DNA, 2195 bp, synthetic construct
  misc_feature 1..2195: note = Description of Artificial Sequence: Synthetic polynucleotide
  source 1..2195: mol_type = other DNA
tygttagtttyggtygttaagtaaatattttttttaggagttygagaagtyggtgtgygaggggaggaattagtttgaggtttatygttttagtaatttygggtgatttatagagtttagattttyggttgtygtagatygyggtaggtaygtaaataagtagttygggagatattttttttttttttagttttygtttttttattttgttattttttagttygtgattagttgttttttttttttttygygggygtttagggttgagtaaatatttygggtygttygtttygttattagttggtttygatyggygtatygttggygattttttaggtaattyggygttatgagaatyggtatttygagattyggygttttgtttttttttygygtttttagggttttggttaggtttaataattttttttttttttgtgygttttagtttttaygggtttttggygygggttaattaggtttygttgygggtttttaggattgygtattttatttttygygaggttagtagtttygggggaaggyggtyggaaaattttttgtttatygggttggataagtattagtttggattygttttttaatttttgyggtttagttttagtagatttttggggtyggaggggaaagggtggtaatttatagatttatttyggaatagggagtggggggtggggttggtgggaatttgattttttggaaaggayggattyggagttagagttaaygtgtttyggagygtagaggtttagggggtygygttaaatattgtatttyggggaataaaatygtgaaggttaattaggataagtyggagtagggaayggggaygtygggaggggagagygygtttygagttgggtagaatttggaayggttataggaaattygggygyggggtagtygggtygagggggatttttgtttayggtttagagtggtttggattyggtttaygygtgagaggagygtttggtgaygattttaygtaygtttggtgattggtggaggttttagagaaggatygtgygtgtaaaaggygaatttyggtgtgyggtgtgtttaygtgtgtaagttggggaggggagggggygtagaaggygtgataaagayggattttgttttgagtgtgygtttygtttyggttygtttttagygaattgtgtttgaagtgtgttttaygggagggttaggaygaaggtgataaaggttaggtgttttttayggagaygygttaaggtagtttygygygtgttygtaggygygttttttggaagaygyggtggggggtgygtagggttgtatttttatattaattgtttyggygaaggtygagtttagaaagtgagtgygygtgagtgtgygygygttygtatgygggggygtggtagttaatagtaataatttataygtyggtagggttagaaatttttattttttttattagtyggaaagtaygagtyggtttagtttggaggtgagtyggggyggggagggtygggtaggttttgtttttgtgtaaayggagygtaygtatttggagygyggygggygttygattagygttttgaatggaggtgatgtaayggtgatgtaggttttagtttattttygtygaaagtaaggagttttgtttggggataggttygygygagagygagtaatttagygygtttggtttagtttyggttttagggagaggtaggttttgygtttyggttygggtttygttattttagttaggatygggtttggtttagygtttygygtygygttttttttattttygttygtttttygtttggggttggagttggttttaaaygttgygttggagyggggtyggyggygagttttaggtaagggttgttgttttttygtttygtygttyggaagagtygggtygggayggyggggagtgggygagggtagaggyggggggattggatattttgygggttggggaygtygygttaatttygttyggtygttgaaagtttttaaattygagtyggttggggattgggggggtgggggagttyggygttgyggttygggttggagggaggggaaattattttataatyggggtttttaagaggagtttttttatygtttgtttttyggtgggagttygyggttattttttttygtgggtggygttttttttgtyg

SEQ ID NO: 10980 - DNA, 2063 bp, synthetic construct
  misc_feature 1..2063: note = Description of Artificial Sequence: Synthetic polynucleotide
  source 1..2063: mol_type = other DNA
tygaggagtygtggaatggaggattayggyggygtayggagtatyggggaggaatygtggggtgygtaggygtyggagygttygggttyggttyggatygaaggtttgygyggtgaaggtgtggtgtttgtgtttyggggaaagggttgttttttygggggattgtttygtagygaggtttgttttgttygtagttgggygttttttggggagygattgagygtaagggygggtygggaggygygaggygagtaygatgttttagggttttaaggattygtgtgygtgtgygtgtgtaaagtggggyggtgtagggygtgtgtayggtaygggygagaygygygtyggtgygggygtygggygtygtygggygtaattatagtataaagttygggygtygyggggygttggttyggagaatttatyggaygygtagaatyggatyggtatttttttygttagtattttaaygyggagttatagygtttagggatyggagggtaggyggyggyggtaaaggatattaygtaagtttttaygtaattttttygagtagtgtaagtttttaggattggygygygtttyggttattyggagygygtatygttygtatttyggygygtttttygygyggtgtagggaattatagygygggygggtattaaggggaaaggaggaggygtggtttggtygaggagttaatgggtygggaggggygygygggggaggagtttaggtgtagagtgtygattggttagttygtttttyggtatgtagatayggtgggagttaygtgttaggggtygggaygattttttgttggaggttaaygyggggyggggaagggggygygagygtttygtttggttgaagyggggggaggggggtttttgttagttagagtaataagatggtygyggtggtagtttygtattttagygygayggtttygggagtygtagtygtygtygtyggtttygtygtygygtagttttgagygtygttygggtygttttttgatagggtagttttagygttygtygygttttygtygtygttatygtygtagtagtygtgggttygttygagtyggaggyggagggagyggagyggtttygygtttagtygttygtagttgttatygtygtygtygtygtygtttaggattyggatttygtyggagtygtatttygtygggygtgaggaggaggaygygtygyggygttgtyggggtyggatttggatttgtygggaygygtygtygtttattygttygygtygtygtygtagtygtygtygtygttygygtygggatttgagttygtggygtyggygttgagygggttttygtygttygygtattttygaggttttygggyggttgttygtgtygtygtygtygttaggttygygttatyggagtttygyggagtygtygtygtygtyggggayggagtttaggtgagygyggtagttygttygtttttygtygtagtygtaattttgtygggaggttygygggttttttgttyggtygagtygagtyggggygggygttggtttttagygattygygtgyggygttaggtttygggtyggtygggtttgaggggagyggygggaagyggtyggggtyggggygygtgtgtgttagtgtgagayggggttgtgtagaygttyggtgtgtattataattaaaygggagtggaatggagggttgaagatggatgtgtttttttttttttaaaatttatgtagyggtgaaattyggtttttttygggtagtttttygtagattttgtattggtgatggtaggygygaattygtygtgttttggtgtaggagttyggtgtygttgtttgggggaagagaaaaattyggggygtgttgygggtgggyggagaaggatttttgggygttttgyggttttgaaattaggtggattttttaayggtgttgyggattgyggagtaatgygtatgaggaaaaygagtygtataatatttgttttgttattagataaygtaattygagygtttggttgtygtttttgttttaagyg

SEQ ID NO: 10981 - DNA, 816 bp, synthetic construct
  misc_feature 1..816: note = Description of Artificial Sequence: Synthetic polynucleotide
  source 1..816: mol_type = other DNA
gygttyggagtgggaggaggggaggygttgttygaygygtttttttaagttttygygttttttttyggyggyggttgttygggggyggtggttyggygtygtttttttygatygttttttttagggtttttttttygtgtygyggttaggttgttyggtyggyggygygttggaaatatgaagagaygttgtagttgyggtggyggtggyggttattgtagtttagagyggygtatgyggyggtyggggygggaygyggggtygggygyggagaagtyggggygggyggtagagaggtygggaygyggatygggtyggggygtttatagtygttygayggygtttagagagygygygtttygtagtttygygtttagttygtygggtatggggygygyggtagtygtttgaagtttyggtttggttyggtygtattyggtyggaggyggagggtagagygygygtttagttgttygggtattaaatyggagygyggygtgygggaggttttagagtaggattggaaatgttttggtygygtygttttttgtttagatatttgttttyggtttttttgttttayggtgagttttygagggttattygagygtttttagtyggyggaggtagttygggygtygyggagttygyggaggygtygggtttggatygyggtayggtttatattgtttttttggyggggygggttygaggggagtttygygtttgtygttttagttttgggagagggggttttgtttatttttygaggtttgggatygtttttttttagggygttyggagttttttgttgyg

SEQ ID NO: 10982 - DNA, 368 bp, synthetic construct
  misc_feature 1..368: note = Description of Artificial Sequence: Synthetic polynucleotide
  source 1..368: mol_type = other DNA
tygttttttttatataggygygtygggaggtttygttttttggtygygygattygggtatttaygtttygygtagygtygyggtyggtttygygtagtagtattattygtattatttygttgtggtttatttgggaygygatttataggggygttgtttygttttgygggaagaggaggyggyggtygtygtgattggggygttyggttttattygtttatagaaygtttttaatattaggggtttgaaagygaaaatttygggaaggtattttttgatygtagattatattttgtagttgatttatatygtttaggaggtagtgagaaaagagggggtgtgtgtagtttayggaygtagayggtayg

SEQ ID NO: 10983 - DNA, 1411 bp, synthetic construct
  misc_feature 1..1411: note = Description of Artificial Sequence: Synthetic polynucleotide
  source 1..1411: mol_type = other DNA
gygggtttttatttygtygttaggagttttttttataattttgagaatyggggtgygaagaaagaaagggygaaagggtygtttaatttttagagagtagttagygaaagattygaggggttttttttygtaggatttygaataattgtagtatttttttagttygyggggtttattaaggagatttttataaataatagtatttgyggygaaggaattattttygtaaagggtagaagygttagattttattagttaattatttagaygygtatygygattygtaagttygggtaygtttygttygggygtaggtagygggaggggtygggtaygttygtgggggtggtttgggtaygggtttgattygggggygygttygggaggggtttgggtttgagtygggggygygttygggggagtgggttgggtttggggygggggygygttyggaggtgggggagtttggggtgggggygygttygtgggggtggggtggggtgtttggttyggggaygygttyggggaggygtggtttgggtttgggtygggggagagtygggtgygtgttttgggtttgygygggggagygygtttggtgtttagatgtttggtatygagygggtgggggaygtygggttyggagtyggyggtaagtttttttttggtaggtaataagttttttttgtagttttgaaggygttttggttagggttattttayggttygggtttttagagtttttttayggtttygaattygagtagtttttggtttttaattygtttyggaaaggtygtttttttttttaatgtgtggygygtttygatygttttttattygtggaataaaagagtagttttygyggagygggtttagagtttgttyggattgttygatggttttyggttttttgagygtygyggttgtygggttttgtgttygygyggggggygggaaggayggtyggggtttttagtgygygtttygyggagyggygygyggygttygaattggaaagttgtygtyggygtttgtygtttttaygtygttttagttttttttygyggggygttttatttattagttaggagattgggygtagggtygtyggggygggyggggggtttattttgtttttgatttttattgygttgtaatygtagaatygtaaggtttgagatttgtgaaaatttyggtttatggtttyggtttyggttagtttygtygtygttttygttttttaggggtygtagaaagattttygggggyggygtttttaggtttyggtttyggtttyggttygygttygtttggtyggygggttgttttyggtgttgygggttygagttgggttggtygygygttttagggattttaggggtygygygygggaggagygygggggayg

SEQ ID NO: 10984 - DNA, 1487 bp, synthetic construct
  misc_feature 1..1487: note = Description of Artificial Sequence: Synthetic polynucleotide
  source 1..1487: mol_type = other DNA
tygtttttgtatttyggggaygtgattttttttttaggttgattygtttttygttttgtygtttttaggtggaggaggagttgaygtatttttagaagaaattaaaagggatagaggaygagttggataaatatttygaggatttgaaggaygygtaggagaagttggagtttayggagaagaaggttttygaygtaygtgtgtagggatgygggagttygyggyggggttaggtyggagtttyggggtygggaaggyggggagagtygtagggggaggaggaagaggaggaggagaaggyggygttttttagygttttttttaaataagtttygaaaaggggtattttttagtagttgtggttagyggtgtygaygttaggtttttttttagyggtgttgaygtyggyggttyggtygggtgattttatygtttygayggtagtyggttyggggggyggggagaggygggggyggttttygygtaggtaaaggtttggggggtyggggygyggttgtgtagttttygtyggagtygagtttagtygagygttygtygttgttygtgygtttttgygttttygygttatggtyggttttaattttttggaggyggtgaaaygtaagatttaggttttgtagtagtaggyggaygaggyggaagatygygygtagggtttgtagygggagttggayggygagygygagyggygygagaaagtgagygtttyggtttygggtttygtattygtagttttttttttygygygttttttttttttttyggtttttygygttgttygttygygygtagttttygggtygtttttttaygttttyggaygtygatygtygatttatatttttgygttygtagttaggattttttatttttttygtygtttttttttttgggtttgggataggggagggggygtygttttygggtygggyggggtyggttaagygggaaatggggggatggggyggagggggtgagygattttygggtggagaagtggagyggygggagggggygtatygtgtaggtttygatttyggggttggygtyggggtttygggtygaggggaattygygatyggatttgtgggggagaatgaggatgaaaaygtggagtttttattgtttagggtttgatyggtygatagggatttygaygggggatyggggatttggggagggggtygtattttttygtttttttygyggtttttyggtttttgtttgtttttttgatygtttttaggggygyggyggygaygtgtttgttttaggyggygggggggatggggggtggaggaagtttagttttaagtygttygtttttttttagttgatttttgygggaatyggggyggygggattttgtttttttttagaaggtttygggaaygttggygyggggttttgaatttaygatygtttgagygtttgttgtgygttttygtygygagtygtagggttyg

SEQ ID NO: 10985 - DNA, 602 bp, synthetic construct
  misc_feature 1..602: note = Description of Artificial Sequence: Synthetic polynucleotide
  source 1..602: mol_type = other DNA
tygttyggttaagttattttttygttagtaggtgaggttygtgaatagttaagttttttttggtayggyggaatygtagtggaygygtggaggggtttygtagaggagggatttttgtttgggatgyggggagttgtagttttttatttgtatttagtttgttagttgtaygtttgtaggattataattttagtataaagtaggattgtagggyggtgyggatttttggagggagatagygyggtgygtttttgtyggttatgttggttggggtggtgttttaggyggttttagtygttagttatagggyggtyggattataattttagtatataaygggagtggaggtggtgattttgagagagggtttgtgttgtgygygtttygyggggtatgttgggagtagtagtattttagttgttttyggtygttggtygtagggttgygggattataattttygtatgaaatggaagagagggtggtgyggatagtttgaggaaggtayggatattttgagggaggtatggataygttgagggaggtayggataygttgagggaggttayggataygttaagggaggtatagtagyggtgygyg

SEQ ID NO: 10986 - DNA, 628 bp, synthetic construct
  misc_feature 1..628: note = Description of Artificial Sequence: Synthetic polynucleotide
  source 1..628: mol_type = other DNA
tyggtattygtygtattatagyggatgggtgtatgygggyggtgattygagttygygygggttgyggaattttttatttattaaygtyggygtygttatgggtttagggggttgggtgaggtygtgagagtyggygaggaagtyggttttgygggttyggtygatttygggtttyggttttgggttgygagggattttagttttygtygtygtgtaaaatgtatataaggttygyggygtygtttttgygygtygtgaggatatagggttgtygttaaggttttaggaagggttttgtagaygtttgtgggggtgggatygyggttgatataaaagygtgtaagtgggttttattttttttattgttygtttttattyggtttygaaaagtggtttttgtttggygttttatttagtgtagygttggtaattatagtagtygtaatttaayggyggaygaagattggaygtyggaagtttygtttaygtygttaygggaaygtttttttgygtttttygtttatggtttggggtyggttttygttttttgtagtattgttttttgggtaatgtagtttgayggaattygggtggtatttggagygtattttttgttttyggtgaggyg

SEQ ID NO: 10987 - DNA, 215 bp, synthetic construct
  misc_feature 1..215: note = Description of Artificial Sequence: Synthetic polynucleotide
  source 1..215: mol_type = other DNA
ayggagggaygggtygtgtagtgtagtyggyggggttagggttaggtygagggygygaggtggtagtyggttyggggaggyggaggttgagygagyggtggtgtttgtggagttgtyggttgyggtggaattatgaaaaatagtaggtatyggagtyggtttttagtttygattaggggagatgggatatgataggtgygattaataygtagtyg

SEQ ID NO: 10988 - DNA, 2638 bp, synthetic construct; identical to SEQ ID NO: 5981
  misc_feature 1..2638: note = Description of Artificial Sequence: Synthetic polynucleotide
  source 1..2638: mol_type = other DNA

SEQ ID NO: 10989 - DNA, 2172 bp, synthetic construct
  misc_feature 1..2172: note = Description of Artificial Sequence: Synthetic polynucleotide
  source 1..2172: mol_type = other DNA
aygggatgtyggtttyggtygtttttattaattgatttatgatyggtttggttagggygttyggtagygagagygtygtygygtygttgggaggtagygttagygyggggaagaayggyggttggtgatttagtatygygtttatggygaagttyggygttyggtgaggtaggaayggatggtaggttatgtttgttttaggaatgatyggattttttatggagaggtttatttattttaggyggggygttgggttttagtyggggataagttygtagttgttgtgttttgttgtttttttgttgttgtttaatagtagtatataatttaaaaggggggaaaaagtaaaataaaaaagaaagaaaaaagaaaaggaggtagaaattataattaatgtattttaaagggaggaggggaagtgttttttggagaatgggaggtygtttttaaagagggtaaggygaaaaattagtaaatatagtygygygggtgatygtttttgtgttttgygtttttaaaaagtygtttttgaaygtyggttttagaagygagaggagygagtagggtttygattygygttygagttttgtygttgagttygaaatagatattttagttttgygttttaggaatttttttttagtttttaggttttttgttgtaaatgtgaaaggtttttttagaagattttttatttttttttttttttttttttygttttttatttgttttttttttttttttttttgttggtggygtttgtagttgtgttagattyggttttaatagggagygagagagyggaaaaagttttttttttttaaaaaaaaaaaaatttgatttaaatttttttttattagygttattaaaatttgaattgtaaattggttttygttygtygtttttttttttttttttttgtttygagttttyggagggtgtttyggttttaatttaaattttgttgggtttttttttygtgttttttttttttttttgttttaaaaygtgagygaattygttttttaaatttgtgtttaggygygtagggtagggaggatttagagggggaaaaaatggaatagagggaaagagagggaggggagagagagagagagagagagagayggagtyggagagggagggagygagagaaagygagagtttttygttatttttygtygtttttagaatttatygggygtttgttyggyggttttagaaggtygggttgygttgtgggttgyggggagtyggaggttttttgattggttttttgaygttttyggattaattgtgttgttgtataggygtggtttttataggtygagtgttgggggatagagttgagttataaaaagaaggtgtyggaaattgtaaygtygtagygtygtatyggtattattgtttgttttgtgaatatgttaatatgattagagggygggygggagttattggggagygygygygtatagagtygtttttaggtggtttatygagagatygttgtagtttttgagttygttygttygttttggtttagtttaygtttgaaatgttttagttatttagtyggggattgagggaggaggtagggttaaggaggaagggggagggagagagggagggagttagygagtaggygagtygggyggggaaggyggagagygygttygggygtygggtaggggygttygttttttttgtatttygttygttttttygatygtygyggtyggttttttttttagttttttttttttttttygtttygggygagtygggygggtggtygagttttttygygagttgttattyggttattyggttttataaaagtyggyggtagtygagaagygagygtygagattttaggtttgygtgttttttagttttaygtggagttaagtttygttyggtygtygttgaagggttttygagttygggtgtttyggtgttggttttttttgygtttgggttgggggagtataaggatgyggttatattttagtataygtatgtgtgggttttttttttattgygttttattygtagttatgtgygggtatttaaatattttyggtgtatttgtattygaataygygttaatatattgggattgaaatatatatygaaaaataygtatatataaataygtatatagtttgygyg

SEQ ID NO: 10990 - DNA, 2548 bp, synthetic construct
  misc_feature 1..2548: note = Description of Artificial Sequence: Synthetic polynucleotide
  source 1..2548: mol_type = other DNA
tygggtgggtttygaaggygaggatggttagaatatgtttttygtgatattttttgtttttttttagggtygtgyggygagaggygttygagtattgttaatgtgaygygggtttayggtygtatygtggggggtagygyggygtygttyggggtttggttttggttggtgaggttgtagttyggygggtagtttttgtgyggyggygttttggtagyggttttttgggtgtttayggtagygtattgttttgtagggtaagtaggatttttaggttttgtttagttggggttttyggygttgggtttygtatttgtygggttgttyggygggygaygygygggaaaggtggtttttgttgttttttggyggyggtyggtttygggtttttttattttaaggygtygygttygtttygttaggatgttagttyggagggggtggtayggtygggygagttygttttttttgggaygggattttttttyggttygtttttygtgtttttaggtggagaaagttyggtatgygggyggaggggtagggttttygaggggtttgyggggtgtgtttttgttttttttgygttttagttgtygttygattygtagygtttygaatgagtttttgtggattgtgaygttggtagaggggtttyggggggagtaagyggaggaggtgttagtgaatygtattttgttttattttaaggtgagaaggtagtttttaggtttttaaggttgggtatygtatttttattygtgtttttttgattttgygtygtttttttttttttagtttgattygyggattttttataaygatttggttttggtgtagttgtggaygtyggtgagttyggggggatyggygygtttygtgtgtttgttttaggagttttaggagttttttgtyggaatygtttgygttatygygggttggggygtttttttygaaggtattgggygtgggtgagtyggygygtggtgggaagaattgggggttygaggtaatagagtgtagggaggtygggttgttttggaaaaatgttgtttgtttttttaaagggggaggaattaaggggggtggtgggaaggggatttttaaggyggggtttttgttttttaaatttgagttttttattttttttttgtagaygggtttgaggttgaagtagtgagagaggttygtgtttttttgtttagtatygatatttgtygaagagttttggggttygggttgygttttagtattatgttttgygtygggtatttggyggggggygttgattygtgttaggtatgaatttagtttgatgagaaaaggtyggttgagtttttttagggttattayggttttttttttttttaygtttgtttgttattygatttttttgagtttttttgtttttatttttaaaatggatataagtggtaagtttatatttgttaggygtaaggtaggygttatagggggtaggtgaatgtagygtttttttttttggtttygtagggtgattygggaggttttttgatttgttttgagtttggttttygttttagagaggttttgttyggagttattttttggggggayggttgyggggagttagggaagttyggggtttatattygygtggtagtgtttaaggattggttttaggagtagatgagyggtgagygttttttttttaatgtttygtttttagtgttttaayggataatygtgggataagttygtttttattyggtttatgtttatttttagtttttttttgtttygggaaagtttgttttttttyggggaaggagtgagggggttagggttttaaatagagggtgagttgatttttgtttygttygtagtagttttttttagtygygagtttagttgtagggagtttttggtttgggattttttttaggagttgtaggtagaygtygttyggttttgygttttttatgttygtttgtgttyggggttttagggygtttgtgygygtttggygtattagtagtgtttgtagygtyggyggygatgyggttagttttgtttattyggattyggayggggggtagaggggagggggtttggttagtttttgatygtygtttygatttttgttyggttygtagagttgygttygttggygtataygttgttgggtttgttgyggaaygygtaggagttgttygggtttygttygggattgyggygtttggttttygttttggtttttttygttttagygtttagggagttttttttgtatttygttygggagttgyggttttatttaggtatttygygttttttagtttagtttagttttggttyggttttattygygyggtatagttatttttttygtygaggyggtattttaattttgtgtttttttaggatygygggttgtaggtattyggttttygaagyggaggtyggagtygygyggagaagttaayggtaatgaygttttttgtygatttttaggaggggataggttgagggtttggaygaggtyggaagygtttttattgtagtttyg

SEQ ID NO: 10991 - DNA, 919 bp, synthetic construct
  misc_feature 1..919: note = Description of Artificial Sequence: Synthetic polynucleotide
  source 1..919: mol_type = other DNA
aygggagtygttgtagggttaggaygtaaagatttygaggttttttaggtygaggggaygtygttttygttttatttttgygttyggtaggtttttggtttygttagtatttgtygtttagggttggatttaygyggygggygggtgaggggtttttggygygyggttatygttygttttgtgttaggtgyggtgyggtagygggagygygyggagttygaattttgtaygtgtggtttygtygggtyggtygttgygagtttygtttyggtttyggttatygtyggggaggaygaygaygaygtggtgggggaygtgttggtattgttggtygygtttttggtttyggggtygygggygtygygygtggaggtygtttttttttgtygtttgygtygggaygygttggtggagyggygygygttgtaygagtttggygtttattatttggtgagtgtyggygygygggagggygggtgagttyggtygggygggagtyggggtgattattygtgtttttygtagttygaygtygagggtgtttttygtygyggttygggtttgaatttgattagyggttagtatagggygttygtggttggtttttaygttttygtygttaygttgtaygtgggtgaggttyggggygtgggaggatygttygttttgtygtttatttygtygttygttygtttgattaygttttattttttttygtagygttyggggagtygtygaggagggggtygtygygttttygggattatttgygtttgtttatttgtatttagtttyggtgttagygtaaygygtgagtgtatttyggttyggattttatattygtattygttyggtttttataagttggaggtggttaaataggtattggayggggttttygttygtttatattttatyg

SEQ ID NO: 10992 - DNA, 2488 bp, synthetic construct
  misc_feature 1..2488: note = Description of Artificial Sequence: Synthetic polynucleotide
  source 1..2488: mol_type = other DNA
gygtagttyggtaggggyggtyggattygggtaaaygtagtttygggtgggagtagggttatttttgttttygagyggttggaataaaaatgyggattgtattttttttttttttttatttaaagtgtttagttttgaagataaggtggagggaggagagagagggyggaggtgtaaatttaatttaatttttgygygygttttygaggyggtyggttgttttygtttygtygtgtttttttattaaggaaggttttttygttaggggtygttaaygttygyggttttyggttagayggtgtatttgagagggatatttygttttttttygggagggattygggtttgttgaagtgggtttaattttgtaaatygygttttaatttttygygtygygtyggggaatttttttttgatatttaaygtttttygtttttatatttttaaatatagtttattttttttttygtggyggtygyggtaattygagttyggttttygtttygtygttagagaaygtttttttygtygggaygyggtgtygagttygttgtatatygagyggtygtggtataatatygyggygttgygygtataattatygttttttaggattygyggygygtatttygggagtggggtgygtttygygattttgggygtttagggttagatatattttttgggygtttygyggtttttatagtgtagtttttatygttttttttttattttygggtatatttattygtttttygttttagtttattyggtttagggygtagtygttttttygygtttttttttttagtttyggtaaaggaagttttttttgygtttttttttttagaatygtttttagtttttygtttttttaatygtagtttaayggtyggyggtagtagtyggagaaggggggyggyggttygggtttyggaaayggttygatygtygggattygggtyggatttygtatttgggttggaagygaggyggagatgggyggtygggattygygagtgagyggggygggyggyggtgatagttttatagttttagttgttgttgttgttgttgtygtygyggttgttyggggagaggggttggtattatygyggygygttattgttyggttygggggygggggtggttaggaggagggtttaggygagtagyggyggtagyggyggyggygtygyggttyggaggaagggggagggggtatygggtayggggaggygggagagggggygggatygggtayggggygggggygggggggaggggagygtagggagggygtaggtagggggagtaggaggagtagtaggaggaggtggyggaggggygggtgagagggaggagtgggtayggggggaaggggagagaggaaaaggaggtatttagggagaggggagaggagaaaggagggagagaggygyggggggagaagaggaggaaggagggggagttgggttaggtagggggggataagggygygttggaygygtygtygtgygtttyggtggggagygygtttttaagggggaagygtttygaggaagatttttgtayggggttgagttyggaaagaaggygttgggatttgtgtttatttatygttttyggaggttgyggtttttgggttyggtgggggttggggggagagggtattyggygggttgtttgyggttaggttaggagagggagatttggtttaaataaagtgatttaggtatttttaggaattttyggygttyggggttttttygggtagttttygatttttatgygtttttygggtttttagggaygygggtatttgtggggyggggttgtygggtttyggggttyggttttttygggyggtyggagygagatttygggttgggaaagttaggtaygtggtyggttttyggtygtattttygttttatttttayggtagggtttttagtgtttgattaagtttaagttygagtttttyggygygttgtttatyggttgttttttygygttttttttttttttttattygtatygtttygttttttattttttttttgttttttttttattatttagtttatatttttttygttttttttttygttttttgygggtattygagtgttygggaggygtttatttgttygatttaaatatttaygygatttttagygttygtygttygygtgttygttttygtttygtygtyggttattgtgtttygttagtttatatygggtygggttttgayggygygygagttatagttgtaaagtaataggataatttyggggaygtygttttagtttagattygggtaygtattgttygtggagayggtatygtyggggaggggagttaygyggattttagatgyggttttttaggyggatagatttttgttyggggygtaggaggaggtaggattggtatygyggggtgggagttttggattttygagtaatttyggattyggttyg

SEQ ID NO: 10993 - DNA, 513 bp, synthetic construct
  misc_feature 1..513: note = Description of Artificial Sequence: Synthetic polynucleotide
  source 1..513: mol_type = other DNA
aygttgttayggtaaygattgtaygygtatttttggagggtggtttgyggttttataggtttygygttyggggaggagaggaggtggtygattagatygtgggttttygggtttttyggtttttttaggttttaaattttttttattagagattttgtttggagtttttatgttagygtttttttttatyggtttttttttttaygtyggttttagtgtattaygyggttyggygagggattgggaaygggatagggaygygttttaatttatttagyggtggagttggggggyggygyggttaygtgggatggygggtagtttaggggattygggygayggggtttggygggtagggttgttttagtygtttttataaagtyggttttttygatttttttttttttttgtagtttttttttttttttttgggggttgggaggggayggggygggaygttggtagtygggagagtggaaaaggttgtatagagtttygtgataagttyggtyg

SEQ ID NO: 10994 - DNA, 1766 bp, synthetic construct
  misc_feature 1..1766: note = Description of Artificial Sequence: Synthetic polynucleotide
  source 1..1766: mol_type = other DNA
gyggatggtyggtttaggygygtttttttattyggggtygtttgtgttyggtgtgtygtgttygygggttaggggygyggygggaagttttygttygttygttagttagyggggttaaataggttatttttttgyggayggtyggygtyggagtttttttttygttygttyggatttattttygtaagtagygttggggttggagtygggyggttyggattagtttyggtttatttgggyggygttygyggtygggtttaygtyggggaaggtttyggtygtygygagttttygttygagtttygygttttttagttatttatttgttttttaygttttatttattagygygtayggtttyggtaattttattyggagyggggygtygtygtygtttttgtygtagttyggtygggtygttgggygtaggggatttygygtygtygttgtygttgtygtygtygtygtygtygttgtygttgttgtatttttyggygagygttgttgtttttttttttgtttttttttygttttttaaygtygtygttatygttttyggtttttttttygygygtygttttagttaaagttyggtttygtatttygttyggatygtttttaaatygttttagttyggtyggttaygttgttttagttagttttttggtayggygttatygtttttygttygtttgttygtyggtttttaygtaggggaggygggygygtttyggggyggggagygtygggtygggagtygyggayggttggggttyggggygyggggggtttagtygyggtgtttttttygagtttttygygygttagygtttttattttyggtttgggggaygygyggttygygattyggttttgtttgttttyggygtayggtttyggtttyggtttygaagtttagtttyggayggggtagtgaaygtagagttggggtttyggyggttttygatttttygatgttttyggattyggttggtygygttttyggygtygagygygtattttygtygggatatatagaygtatatttattygatatattttygtttttgttygttttyggyggagagttgaaatagatgtgggattygtttaggagttggaaaygagggagggaagygagttagagttttgtgtgtaygtgtgtgtgygtaatatataaattagggggtatygttaataaattaaatatygtgataaatttaggagggttatygattaggtttatttggttggaaaygaygtgaatttgtttttttttygtttttttttttttttttttyggagttggagggagttaaatgtttygyggggagtgygatagtttyggtygggygtttttttygtaatgataygttaataaatgtttttttttatttgtttttataggattygtttyggtttgtaaatattygattgtttttgtygaaagtttygygttygtttttagttatatatatttgttattggagaggtyggygtyggtygygattygtagtttaatygtagggtaaatygagttgtttgtgygygttygagaatttttygagaaattaatttyggtttaagtgaaaatagtagttgttgtttagaaatggttygggagtagtatagaaaggagaaatyggtttttttygaaaggggaggaattggatttaagggggtgttgtttatygtggttttygttgtttttygygttatagaagaggtyggagggggatyggtttgaygygggtgggtaaagagyg

SEQ ID NO: 10995 - DNA, 6511 bp, synthetic construct
  misc_feature 1..6511: note = Description of Artificial Sequence: Synthetic polynucleotide
  source 1..6511: mol_type = other DNA
gygatttygggggttagtagagaggagaggttgygggaggattygttgygaagggygaggggtggygttgggtgggaygggygtttggggtygtgtagggtggtttttgggtgttgttygggttgtttgtygtttagtattggygtaggaagaygggttygygtagygtttggtaatagtggtttgttttaygtttggaggygattaagttttgagttaaaggygtygggtttagtygggaagtgtatggygatttagaatayggagyggagaaggttttaggggataygaggttatygttttagttttygggtttgygtttygagyggttagggtgygtayggatgggtttygggatgttagtggagaggtgataggagtttattattttayggttaagygtgtgaggttttyggygggygggggtttttttyggggtagggtagggggagagttaggtatgtttttaaygggttttttagtagaatygttaggaaagtggtttttaattttaggtatttttgtggtttttaggtagttgggygattaaaaatttatttttgtttgttgtgaaatgggataggtggttgttaggttagagattgtgtttaygaagtttygtttggygggtygggattgaygtggattygggtttttttyggaagtttgggaatttgtgagttttttagtttttygttttattttgtttgtttgaaaaaaggagttgtttgagaggaagagttaaggtttaaaaggttttaaaygaagagtatgyggtttgaygyggagygtaaagaagygagtagtgaattgaatttggtgggattgagattagaggygtttgtatgyggyggtygtttygygttttattaaagtaatttgttatttaygataattatttttgtaattattttggagtggttgtgatttgatgtttgtggtgttttagggtatgtttttattggatatagatattttagggtgttttttgaygttagtgtyggtttagtgggtgttagtgtygygaagggagggtggygggygtgaatgttttttttttttgggtttgtygtaggtttyggtttttttattttgtttgattttggygggtttgttatttattgaggtttttatyggygtttaygttgtttygagaggygggataaaygttyggygygtggygyggagtttgygaaagygttygggggtttttattttttgttygggagttttttttttggggygggaagaggagtygtagatttgttygaattttgttttattygtttggtygttttttttygtttggggtgggggtaggggtggyggatgatttaggtttggggtygggagttttgtttttaaaggtattatttygygtttttttggaagtggygygttgttggggygttttygttgttgtagaggtttggtttgyggttttataggggygtgggtttagggtttttagggagtaagtgagtttaggttttttagggggyggtagaggggaattttygataattttttatttttttttttaggyggttgygaggttttyggggttttagaggggtttttttttgtyggtgtyggttgttttgagygyggttaygtagttygygtttttaygtgggtaaggggyggggaygttggagggaggttgttttggatgttggagttttyggttttyggttttgttgagtagaaaagttgaagttaaggaagggttgaggtttttttataagggygygygygtgtttgggtgtyggtttagaagtygagaatgtgygtattggggaagggtttttygtgtygagaagatagaggatttgttttagttgtttttygtatagagggygyggaggttgygttttagttygaaygtttatttattggaaagagggtagygtyggggtttagggaagttttttgggaatgaatggtttttgttaagyggtttyggattttttgggttttttgggtttayggtayggtgttgygygagtttttagtgtttatyggtttttttygttttttgygtagaygtttttaggyggggaggtatatyggttttttygggtagttttggttagtgttgttgtgggaaaggagagttagggtttgggatgggggatgagtatttttttgtttatttygggttttagygtgtaggaggtaaatttgttagtatagataagatagtttgtttaagttgtattttaggtygggttagagaataaaatygagggttagaaggtttagaatgtyggatagtttagyggtattygttagggagttttaggygttygaaagaggygtygtatttttggygagtttaggatttatttttttggatttgtgttttggagtgtttgygggtttgggtttaatttttgtttttggtaggtgtttttttttttygtygttaatattaggagygttgtttttgyggtaatttattttatttttagaagtttgttttgggatygaagtgttagggttttgtgtgtttttttatgtattgttttttttagtgtaaagttttgtagatatgtttggtygaaaagttttagtggttttaatttttagattttgttttygygttyggtyggaaaattatttgggatttggttgttgtttaaggtygggggaaagttttttttggaggaygtttattattattatttttttttaggtttatttgggtttaaataaatgttaaagtttaaaygaattygagaaggaatagygaggtagtggatgtygttatttygtggatgggagagttatgtttattgtaggtgyggatatygtattgataggtattgattattgtaaaatygtatttagtattaaatagaaatagttttgttttttaatttttatagaatgtttaaatttagtttagggagttagttggggygttttaataaataygttttygagaattagygatgttttttttataatgaaagttaattgttgtataataattgggttaaagaatttygttagtttaaattttaaaaattagtattgtattttgtttttaagtttgggtggtaagtatygaaggggagagggaagtagygtttgtgtggaaggaagtttygttttttgtttaaatatgtgggatttgggtgtttatttttttagtygagagttttttgtaggtttttttttaattttttgtatttttttatttttattttattygtggygttygggttttatttttgttyggygttttttttttagggygagtagaggtttttgagtgatyggttygttagaggtagttgtagagtyggygtttygtagggtagggtagggtygggtygttgggttggtttagtgygygygggttttttttggttttagttagtygygggagatgttatttygggygatagyggygagaygtygttgttygtaatttttgggygggtaggatygtttgttgtttttgyggtttttggggtagattttttaggagttttttttttttttttttygttygggggtygggatygygttgtgtttayggagggaattgggygtttttggygtattggggttttagttgtatgattttagtttagattttaagttttagtggggtgtaggtgggatgggatgtgtttttaggagatgaggagatttyggttgttgagtygttttttaaatgygtagttttttaattttaggtgatattygttttttggaggaaygagtgaaggtygtttaggygaaagaggggtgggttttagtatttggatttttttttttagttttgttaattttaggtgtgtttayggtggaggtgatagaaggaaggygygtygggggatttaggtttygtaggttttyggttgttaaygaggtatygtttattgatttygygtttygttttttatagygtggggttyggygttgygttaggttygggtgyggggyggagttaggttgggattggttgggggtygtttygttyggygtttgggttttygygtyggttttyggggaggagttatgataattttttttttattaaggygttygggtttttyggttatygttaggatatattgttygggygyggtttttttygttygyggagyggttttgatattygyggyggtagtatttaygttygtagagtygtygatgygtgtttagtgattyggatagtaaggttygygygyggygggggyggyggtagaygtttggttatygtgatttygattttggatttatygtttgggggttggggggattttggatttaattggygattgttttgggggaygtyggaygttatgttgtggaaaataatygataatgttaagtaygaagaggattgygaggtgagttggggtttyggggtgtagtttygtttygtygaggatagttygggaggtaggggttattggatygaggtyggggaygagggtataggagttttggtttttyggtgggaygggatttattttttyggatattttttagtttatttttgyggggttttttttttgtatagggtttttttttaaatagttttttttygggaaygaggtttggaaagagaatggtaaattttatttatatagtttatygggygtttttttaagyggtaaatagttttgtttttygttttttyggaaaagtgtttygtttgtaatttttagaygtggtttttaygtaygaagtttttgtttaaaggggttagatgaggttatttgttagygatattttggyggatatttttttaaggtyggtttgttatttgtttygttattttttyggggaagtaygaaaataatygaagtttggtttttaaaagaagtgggggttggggagtggtggtgggggtgttygaggttagatggggtygtaagagttygygagtgttttagtttgtyggataggttgagttagagtttyggagagtgggagggaagaaggaggyggygagygggaagaggaagaagaygtaggtagygttaggygagtttaggggygtygggagygyggagttygggttayggattygygggagtttattgygttttygggttttggagggttgtttttgttygtaggttygggygttttygttaggaggygatagygttatgtttttttaggttttyggygtttygagatttttgggtagatggggaygtattttttagaaattgagtygggtygtttaggggygagggaaygtgygygggtaaggttgtttaatttttagggttttttatgttttttttgygtttygaygtgygagaatattgtttttggtagtgtagggygtttttatttattatttttttyggttgggttyggttagtagggagggtygttttgtgygygygttttttttttattttttagggyggygtagggtggygggttttgtttttygagygtygttygttyggaggtttttgtttygagggygtggaagggagggtttygggggygggggaggtgygtatttttygygtygygtattttattygygtttgtygygttgttatttttagtagtttttgygttatgggygggttttaygagatagttttgtatygggygttyggttttttygtttygggttttggttttttygtttygggtttyggttayggatttttttggtttaagatttagggttyggatttggygtttttaagygtttygggtttgggagtagygtttagattttygtygtygggttttgagaattygtttttttaggttttttattagattttttttttttttygtattttttgtttataaygaaattttyggggygtattgttttygggtatttttygattttgggtaagtttygtygggyggggtgyggttggtttttyggggttttttgygtagttyggygatgtyggttagttygtagtagyggggtttygtattaayggggttttttgtttttttttttttttttaggatygttaygaygggagtagtaatgggaattygygggttttttatttttttttygtygggtagtatttttatagtttygygttattttttttttatattggagtygtygaatattagtygttattttattttttttttttttattagtagttggtttatttttagtyggtygatttttattygtatttgggggaagygtaygtygtygttattaattttttgtattagtyggygtttataggtagttagtagtaggtttggttyggtygttagagttaggagggagyggggttgttttygtattaygggygttyggtyggtttattgttttattttttygggttggaggygggygyggtgagygttygtagggatgtttatygtygtttygatttgttgttgttttaygtataygttttggatgtygygggtttggtygagaatttggggttttaygatatgttttattagatggaygaggtgtaggtgagyggygttgyggtttttgatyggatttgtttattttayg

SEQ ID NO: 10996 - DNA, 6511 bp, synthetic construct; identical to SEQ ID NO: 10995
  misc_feature 1..6511: note = Description of Artificial Sequence: Synthetic polynucleotide
  source 1..6511: mol_type = other DNA

SEQ ID NO: 10997 - DNA, 338 bp, synthetic construct
  misc_feature 1..338: note = Description of Artificial Sequence: Synthetic polynucleotide
  source 1..338: mol_type = other DNA
tygtttttygygtatgygtttaggtyggttygtaggtttttttygttttagtyggtagttagttygttygygttggggttatygygagtyggttygtagyggggttatygygattttyggygtagatatagaggtygtttttagtttygtygtttygtggtttygttttygttgtaygtttttttatttttyggatttygtagggtygyggyggatayggttygatyggggaygtgaaygygtagaattatattttttagygtttygttygygttggaattatatttttyggggggttyggyggtgtattygtyggggtygyggattggaggttttyg

SEQ ID NO: 10998 - DNA, 936 bp, synthetic construct
  misc_feature 1..936: note = Description of Artificial Sequence: Synthetic polynucleotide
  source 1..936: mol_type = other DNA
gygttttgttygtttattgggtttttygtyggtttatttgtatggttygaggggggyggggttgaygtygygttgggaatgttttggtygagatattgaggtagggtagagagygtttgygggygtygggyggagttgttgyggattaggattygagtygattttygatttygatttagattttaattygygttttygtttygtygtygtygttatgtaygaygtagagygyggttggagtttgtttttygygggttgyggttttttgggtttttattaygtyggggygattygttgtttgagygagtaygtttygtatttttttygygaygygygtatgttgttyggygtttyggtyggggygttgtattgygtyggygtttttttyggtatttygttgggtgygtttggggaygttgttygggttttaygtgyggagtgggtgttttttaggtyggggagygggggatttttaggggtygyggggttttggaggagygggtatyggaygyggatayggyggggtgtatttygagggtttttttygaggtagatgttttttgygggggygttgtttttgggttygggaagggggygttggaatttygagyggttygggtygaagtttgggattttygtgygtttttatttttatttttattaggygttygtgtatgaagggagatttttattttyggattgagagtyggagygtttyggagygayggggagtagggagygggattyggggyggagggtagtgttggtttttgyggatttygggttttttgtgttttttygggaggggttggaygggttgagttgtygaggggtygatttgttttgggtyggataaagagtggggttttggtyggttttttayggtgggttttttttttttggggattgagggatttaagatatttygygtttgyg

SEQ ID NO: 10999 - DNA, 2184 bp, synthetic construct
  misc_feature 1..2184: note = Description of Artificial Sequence: Synthetic polynucleotide
  source 1..2184: mol_type = other DNA
gygygtttttttaatttttttgygttttagttttttyggttttagtattttygtgatttgagtatyggygggtttttgtttattgtttagtattygaygtatttgttttygtygygtagtttttttttttyggtttgagtttttttttyggygygtattgtttttgtgatttttttttttttyggttatagatgtagttttyggttagaagttttattttttygaggttttygtttttgttaggtagtttttttgyggygtygtttatttagagttttttttttggaygtttttttagtgtttttttagtagtttyggyggttttttttttatttttagtttttttttyggttttttaggaaggggttagattttagtttagtatttagygttttttggttttttttttttgggygttttttygatagttttttttagggaagttggttygttgygygtttttattttyggtygtygtttggatagaggygygtaattyggagggygtaggtttyggttyggagaagggggtgtygtyggygtttygattttttaggaatggggaaatagaggtayggtggattyggyggyggggttgggtttggggttggaygttgatttaggatttygtttttgttygttttgygtygygtttttttygggtyggttttgatygagtagttttaygygggttyggggttygtttattygataggagyggggggttgtagtttaygagtttaygagttygtagygaygtattyggagtgtaatttygtagagttayggagatattttttyggtgtgggygtttygtygygtttttttttygygggttgyggttattttagggtaggatagagtygagatgttygggtgggagygatgttygygtgggggygatgtaaygggggagatgtttggggggagggtggtaaggtgaaatttggtggagaataatgggggtgggtgggygatttttggggaggtgttyggtgtggggtgtttttggttygttyggggatagtgygygttttttygttygyggygttygttttgttygttttatygaggtttttygggagygtttgggtttayggtttyggggggttttttygagatttgggygttgttttgggggagtaggggttygggttattaaggttygtgyggatygtggggtgttttaygtttaggtygggggattttagagtttygttttttttaagggygtygygtttyggattgtaggtggagayggggatyggtttygyggggtygtygataggygyggggygggatagggtgggaggyggyggggygtagagtttttyggtygtyggygygattygggtatttttttggaggyggygggagygyggtygyggygttttyggggtggggtttaggttggaggtttyggggygtatygttttagttttatttyggtygggttttygygttgtttttgyggagagggaggaaggaaggaaggtagggagggaggggayggtyggtaggygtggggttygyggygttagggtttttttttttygttygttttattttgtaattygtagttygggyggggtttygttgtttttttttygaatatagtygtttttttttttttttttaatttygagygttttttttttygaatgygggagtttatagtgtaygggaagtttttttttttttttatygaggttgttygaygttttttttatttttygatttttygtaattattttttaaatgtttyggyggttagtagggttggggtgggygtaggagaattaggggttttgttygtatgtaggggtttggggtyggtgtggtygaatgaaygygygggtttagaygagtttgtgatgttttygttttttattttttygygatttggttttagaagatagtttgagaggtyggtggtygyggattttggaygygttttttttttgtttgtggtttttttttatttyggtagygttgtgagtttattttttatttataggagttatatttagaatttttttttggggttatagygtgggttttygatatttgtgtgattttagttttgtttttttagggttgygtggtgaagtttttaggatttttygygtgggttgggygggtgaygtggatgagggataaygtggtgaggttttygtygtggyg

SEQ ID NO: 11000 - DNA, 413 bp, synthetic construct
  misc_feature 1..413: note = Description of Artificial Sequence: Synthetic polynucleotide
  source 1..413: mol_type = other DNA
tyggggygtgggagttgygttygtttttttttttyggygtttygtggagatygggaggtttagygttttttttagtttttagygtygtttttttagattttagagaygtyggttagggygyggygtttygggttattgygggtttttttygggygggygaygtggggggygaggtatygygyggyggygtttggygggtattgttgttygyggagggayggtgggggggttttagtagttggygggggtggagggggygggagagggagtttgygtygggttgagtttggaggtgyggggygggttyggggagygtttttggggttttttttgttatagtyggggyggttggaattttttttttttttttttttatttttttattttttttgttyggtttygtygttaggtyg

SEQ ID NO: 11001 - DNA, 403 bp, synthetic construct
  misc_feature 1..403: note = Description of Artificial Sequence: Synthetic polynucleotide
  source 1..403: mol_type = other DNA
tygtttagtttttgygttyggaagaaaatttagygtaggtygggtttyggygygyggaagttttgygaattttaaatgtgtgygttgagtygaggtttttaagyggtaggagagaatttgattttygatattttttttaagataygygtyggtggatygggttttgggattggtttattttygggttggattttggggttygtatatttgaaagygtaaatttgaggaatgayggyggggtgatgggtattttatagagtgggatttaatygtgtttagtaatagatttttttaaatttttttttaaaaagagttttttagagttgtygaaattttygyggggtgaaagttaaatttttggagtygttgtgtagtygggtagaggatayggyggygygagtyg

SEQ ID NO: 11002 - DNA, 675 bp, synthetic construct
  misc_feature 1..675: note = Description of Artificial Sequence: Synthetic polynucleotide
  source 1..675: mol_type = other DNA
tygtttttaaaygtaygattatttttttagttttttagtattaaatttagyggttttattyggttaygtttttaygttaggttatgatttttatatggtttattgygtaagtttatatttagttttaggaagygagttttaygtygttttagttttgtatttatagtygttaagyggtttyggaagtygaatgtyggataggttaaagatagygtygttgtttyggtattgtygttagagggygyggagtygtygtgttggtttgtattttttttgttaygttagtygaayggttayggtaatggaggattttgtygtatgygaygataggatgattgttttttttgaagttttattaaatayggagaggtttttttgtttttgggagaygyggtgatgtgaygtagyggttgtagygaaggttttttgtaaaagatggtygttgyggagttgttaggtgttttttggtaggyggyggtygtattataagatggyggttygttttagggttttataygyggggttgyggaggyggyggtttygagggttttygttttttgttggttttgttttygygtgyggggttgygatttgtttttgtgtgygggtggaagtgygggtygttttggggtygagttgtaatttygygatattttattggagtgygatgagayg

SEQ ID NO: 11003 - DNA, 580 bp, synthetic construct
  misc_feature 1..580: note = Description of Artificial Sequence: Synthetic polynucleotide
  source 1..580: mol_type = other DNA
gyggtggtygaggaygttttttttggygttygggggtatyggatygyggttygtygggatggaggtaggtaggtagygtttygggagggttttagggagyggttyggagttgttyggyggggygtttagggygtagygggtagygtttatygagggygygtaggtatttttygaaattttygttgattaatattttttagtatttagtgaagtygattggtatttyggggagtgattggagttagttggttataagygggygggayggttggagattgtygggatagyggttgtyggtgttaygygggtggtgggyggttyggaaatgagygtttttyggggatagggggttttgyggggyggygatagttggatttttagygygtataaagtttgygggaggatttattgtagyggtygttttttttygtttagygagggygggygtaggggygggggatgtygaagggttaggtttgtttaggtygygttattttygttttagaygtttagttygttttttttataaaggaagaggagatyggagaygggaygtttgttttgttggtygaatttttyg

SEQ ID NO: 11004 - DNA, 858 bp, synthetic construct
  misc_feature 1..858: note = Description of Artificial Sequence: Synthetic polynucleotide
  source 1..858: mol_type = other DNA
tygggtaygttgagtttatygagaattttaaggagttaaygagggygggtgtttttatatttttttagggattagygtygttygatygtaattttggggaagatttyggyggttttggagaggagggataggtttttattatttatttggttagtttygyggaagggttggtggatgaatgaattgttttttygtyggtygagtttygygggatagyggyggatygyggggtgtttatttgtggggatgttygagggttttttygagttygtatttagatagggattttaggggtggaggaygagygttaggagtagtagttgaggttttatygtgtatttttttatattyggttttygagggtygygygggtttaggygtttayggtttygtagygtygygtttttygygagaaygtagagattygggttygttttgagtygtygattgygggygggagtyggygggtaaggygygyggtyggtagtyggagyggygygtaaygtagttgagtgaggtygtyggtggaggtayggagtagtaggygttyggggygttgyggaggttttataggtttttygaggggaggygayggggygggtygygttttggttattggtygtyggttgattygtygtygttgygygttyggtgyggtygttttagttygtttttttgggttttaygtttggattgtttgtttagygyggaygttatttaaggagttgtttgyggttaygtgtggaggtttaygtagygtttttggttggaayggggaagtttgtatttagttttgggagtgggtttgggagagggaggaggagtygtygggagtttggygggagggyggtgttttyg

SEQ ID NO: 11005 - DNA, 5715 bp, synthetic construct
  misc_feature 1..5715: note = Description of Artificial Sequence: Synthetic polynucleotide
  source 1..5715: mol_type = other DNA
tygggattyggtttttygtattygtygtyggtgttgtygaygtttatagygttgatgagattttygaggtttygggttyggttttaggagtttttgtttttyggttgaggaagyggyggyggyggyggttgyggttggggtggtagttygggttttttttttaygtygatggygatgtagttgagattattttggaagtyggtagaggtttttttgygtatgggygatttatygtttttaggataatygattaagttttygggttgattyggggtttayggtyggttttgyggtgttaaagggggygtyggttgtaattgtygtggggaggtgggyggttygtygttttttttagggtygatatttaygtygttttygttgttttttttgagagagatattttttayggaggtygagttgtggygtttggggttgtgggygaaggayggggataygggggtgatygtygtggtggaggagaaggtttyggaattgtggyggyggyggtttttttgygggtttgygyggatgattttggygtygyggtgggggttygggggttggttggtttgtaggaaggtttygattttygatatttgttttatgaggtttagtttttttaygttygaygtygggttggttaygygggtagtttttggtttygggggggtygygataggttgyggyggggtggyggttatattaaaagttatttyggtgtagttattattgttttyggtgttygaggataaygatgaggyggygttygggttttgggyggtggtaayggtygaggyggggggtaggyggtatagttttttyggggtyggyggyggtggyggyggttgtagagaygaygayggggaygyggayggaygygggggtaayggyggatayggggaggaggtttygggggataggaggtygtttaaggagtttayggggtggtygttyggggygttyggtttaggagatttgggggagttgaagtygaggtttatgtagtyggagagyggagatygttgtyggttgtygttgttggtgttyggggtgtttgagtttagygaygaggtygggttgttggyggataagagygaggaggaygaggtygtygaygttagtaggggaggygygggyggygataggygggtttygggttygttaaagtygatgttgatgtattygtyggggtttttgggtttyggtggtagtgggtattygtgtatgttgggtaggttgggtagtttttttagggataggygygtgggttttatygttyggtygygttggtttaagaagtttttygggyggtygtygttaggtygtaygggygaaggtattatagggtgagggggttgygtggggtyggtttygaaggygttggtygtttggttgggttttggygtggtttgaggttttagaygttttttttttaggatgygttttaygggggagtttatgagtaygtattggtygttgttttygttataggtgtagggggttttgtaggagyggggtaaggagttgtagtagtagtygggaaygtttttgagyggtttttygtyggggtgtagggttgyggagaagaagtygggyggggtgttygtggtgatygygtygttgggggataygttgaggtagttttygttgggtagtagtttgttatttgtatgttttatggatagtttggaatygtattatatgygtatgtatttattgttttygggggagttttyggygggygagttggttttgtagtygttttygttygtygggaatgttttgttygtygtagaggtgggtgttggtttygtaggtttygtagaaggtayggyggyggyggyggyggyggyggttttgggttgtaagatttgtttgggggyggataygttggyggggtttatgggtatgtagtygtygtttttgtagttgtygtttttattgttygygagggtygygtygggygttatgggtatgtagtygtygtttgtttttaggttgttgttggagtttttgtgggagtygatttygatgttttygtagttttttgggtaggggtggtaggttattttgggagaggaygyggggtaggaygggtagaggyggttygygttgttygagaaggtggttygtattagggtgtatttatttagygaggtagaggagggttggggtatyggtygttgtygggttggygtggttagggagtaggtttttttgygtagttttyggtttaggttttgggtygygtttttygagattyggyggtaggagyggttatagtggtttaggggtttgtttatggttatgtattygtagaatttatygtygtygtygtygtttygggtygggggygttttygygatggattygggygtgttgtttyggtggttgtagaaggygygtaggtygtttgggttggagtygtattygtttagggatatgaagtyggggtygttgggggagttygaggyggaggygttgtygttggagggtygttggtyggggtygtggtgtagyggatgyggtagaggygggtgygggtygggyggyggygggtaggagttygagtygtggtygttgttggaygatagggagtyggggttggtggyggygggyggygagtgygttaygggtatggatatggagyggttgtgttgtagygygttttttgtyggtagtagygttattttgttttygyggtygtygtagtygtygtttagggtgtgygagyggtttaggggygygygtatyggttyggggtttagggggtttttagttatygatatyggtttggygttygyggtygtygttttygtygtygygtygtygtygttttygttggyggtgygtattyggtaygagttgtatttggtygtyggyggggtggyggttaggttgtyggtgygygagyggygtattaggttygtttggttggggggtaggttgattaggtggtggtggyggygygygtyggggaygttgatggggtgygtggtygaygatttygaygattggtttttattgygyggtyggaattygaagagttttttgagygtttttatggtttttaggatggtttygtggatgttttgygttattatygagtygttygtttgtatttatagttygtyggggtttgtgayggtygagyggtttatttygatgaagaagaagttgttygagtggtygtagyggyggatgtttatgagttgtagygttatygayggttgttygtagttgagttttaygaagtygatggtgygygtagataggtatagayggtatattttygttaggtttttgttttggtttagatttttgggttttaggtttatttgttatattttayggtaggyggtygtggygggagttattagttygtagttgttttyggtttyggyggygtyggtagagtygtttagggygtygggtagggaggygttgtaggaygyggygggygyggyggyggggggygygttttyggyggtygygyggttttygttgattaggtyggtgagygygyggtattagtttttttgtttttgttygttttyggyggttayggygaagtattygtttttggtgtagagggygattaggtatttgtgtttggygtyggygygtttgttgatgtttaggtagtagtygagagygattattygtttyggygygtttgttttgtttygttattttttttygttttygtagtattygagtygyggyggttgyggygtygatttttygttygtygtygtttygtygtygttygygtygggttygygtagtaygaagaagygtttgtggttatgtttttgtttgygtaggtagtygtatttgygtaygttgtggttgttgttgttgttgttgttgttgaggttggggtygttttygttygtyggttygggyggttygtgtygyggygggttygttatygygggygttttaggtygygyggttygggttyggygtttaggggttggggygaggggyggagggggygygggygggggyggtttttttttatttttgygttyggtygttygttygattaygygtttttygggtttaggyggtggggaaggttyggggaggttygygggggttagtatygttyggyggygtygygtttttygygttttggggtttttgaggatgttyggygygggyggtggtygttttttttttyggttgtttgyggtygttgttttttygggttttygggyggygtygggggaygygttygttgggtygggagtyggggttttygagtygyggggtygagtttaaggygygygyggtygtatyggggttgttgtygtygygtygygtttygggaagtyggggtgygttygggygttyggggttygygtygtygtyggggttgttgttgttgttggtgttgttgttgttgttgttaayggygattygggttygtygyggttttygtygtatagtgagtaatatatygygtatygagtgattgaattaagaagagtaaaataatatgtgattyggygttaygtaggtatatatagygyggtygtttygtttygttgtttygtattggygtygygtttttygayggayggygygttyggttaatyggygyggygttygygggggygggtygygygttttygtttygttttttttttttttygggtygygtttttygtygttttttttttttttygygaaggtttyggttyggtygggyggggtggggyggtttyggttttattaattagyggtttgttgtggatgtyggyggaggagatgttatttagggygggaaaaggggygyggaagaggggyggggygggttayggygygtagggtttttttttttygtttyggatttaattaattgggtttgagtttttgtyggggagggggygtygggyggggtygyggttgggyggggygggggatygggatyggyggygggggttgyggttttgtagtggaagtatgggyggygagtygggtygtgttttyggggygyggggtttttattttgggygagggyggtygttttygygttyggggtgggygygttttattttygtttttygtttttygttttygtttttyggtygtattttygttttttygtagtygygaaaygyggggaggttttagggttygyggtygygggttygygagtatygygttttagatygagagyggygygygttttttygtggaggatagaggggygyggagggggygtttgtgttttattygttygygggygttttayggggygttttttgygttatttatttgttagtttgtygggaagttgaaatygygtttgggaggtaataggagaaagagatyggggayggtaggyggagaaagtgyggtttttatagygtyggggagagggyggattygygagttagyggtttttgagtygggagatygygygggygtttttttagttttygtaggagygtygtttttttttygtaggggygttttttttttttatygttgtaggagtattttttttttttttyggaagygtttttttattatatygttttaagagtttttttttttttttataggggygtttttttttttttygaggtaggagygttttttttttttttataggagygttttttttattttaggagygttttgygtttagtagaygggtaggtgggygggygtttattatttgtgtgygyggtgygggyg

SEQ ID NO: 11006 - DNA, 858 bp, synthetic construct; identical to SEQ ID NO: 11004
  misc_feature 1..858: note = Description of Artificial Sequence: Synthetic polynucleotide
  source 1..858: mol_type = other DNA

SEQ ID NO: 11007 - DNA, 247 bp, synthetic construct
  misc_feature 1..247: note = Description of Artificial Sequence: Synthetic polynucleotide
  source 1..247: mol_type = other DNA
tyggaattttyggggaggattaaygtyggygtatygtgyggtyggggyggggygtygtttaaatttaggttttgtgatagygattgtggyggtttggaaagygtgggtttyggttattgggtaygagyggttaygtgatagygggtttttttaggttagygttggtggttgagtgatgtaattaygtggggtttgaagttttygtgggtgtaggttttttygttatgttgaygataggtagtgttyg

SEQ ID NO: 11008 - DNA, 224 bp, synthetic construct
  misc_feature 1..224: note = Description of Artificial Sequence: Synthetic polynucleotide
  source 1..224: mol_type = other DNA
aygttygtttttttttygggtagttttttttatttaggygggatttgggttttygttggatttagggtygttttttygtaggyggggtyggttyggygygtattttgtttyggatgttttggygtayggtttygygtttygtttttattttggygtatttggttttgygtttttttttygtttggygtagygttttttgtygtttttttttttttttggyggyg

SEQ ID NO: 11009 - DNA, 1174 bp, synthetic construct
  misc_feature 1..1174: note = Description of Artificial Sequence: Synthetic polynucleotide
  source 1..1174: mol_type = other DNA
gyggygaattaaagagtagggaattataaaagayggtyggyggygagtaggttggggtgayggggatttygtggataaygggtttgaggaygtttagggttttagttttttttaggygtttttygtyggggtaaygtagagtagttgtygtttttttygygttttagtagatggtggtgttagttyggtttygtgttyggtygtygttgygttygygtttttttttttygtagatggtttaattagggttttygttygttttttygyggttttygtttygygygtttgggygagygttgygaaygtggagttaggtagttaagtgttattgygtatagtaggtagtttggtaattgagagtataatatygagtagatggtgttygtayggygtgatggatattatataygatagtttgagataatttaggaattttttggtgattygaggttttttttgtataaaatgagttttttttttattgtygtgtatttttggggttatttgtttttttttttygattgatattgaattggttttttattatygattttttttttagtyggaggggaggaagaatttaagtgggggagggygygggaaggggaygtggagggaaayggaagggttgggagtggggtaggggggtagtggygattttyggggggggagggtggyggatattagattttagggtygatagttygggagggatygggttttaggattttagttgtataaagtyggttyggggagggggygataaggagygagtttygggtyggttyggtatygttgtttyggtttagagtttttgtaatygtttggtttaygaataatttaaatgaaatttagggttttattgaaaaagttttttggggtttaatttagtttttygattttagtttatatgtttataagtttttaggggatttyggttaggaagttaggagtggggttygtgygttttyggtaggatttagattgtttttyggygtaggyggttttaataaagaagtttaygaggyggtttygggygygggtaggggyggtgyggyggygttygggagattygygaggggttttggaggttttyggttygygygygtygttygggagttygygaggttgyggtgtgttttagygggygtattttttaggtttygttatatyg

SEQ ID NO: 11010 - DNA, 8657 bp, synthetic construct
  misc_feature 1..8657: note = Description of Artificial Sequence: Synthetic polynucleotide
  source 1..8657: mol_type = other DNA
tyggattttttttygggtttttygggygtttygttttttyggggttggtttttttttttttttygggygtygtyggtygygggtygtttattttttttgggttygtagtygtygttyggggatyggtagtgggattygagygggtgygygttygttttgttygygtygttggtygtttttggygyggtgtgtagggtttygtygggggtygyggtygtagagttgtatygtaggagattttggttttgtagygtygygtttaagttttygtagtttgtgtagttgtygtagaagggygaygtgtagtagagggggyggtttagtagyggygaggtagggtagggygagttttttggyggtgtttyggttgaggtyggygyggyggtygygggtagtttyggtggttygtagttygggtttaggttyggttgtttgaggttygaygtggygatttyggttagygattatagtttgggtttgttggyggggggyggygygttyggagaygttyggttgttttggggygttttgyggttatygyggggygyggtttygggyggggggtttagtagyggygtttttaagtyggtaagyggygaygaggttaygggtttgggyggygttaggtttygttygtttttttygtygtygttttygtygttttttaggtygttatatttgtttttgtatttygagttygattygtatagggggttttyggygyggtayggaagttttttttygttygattyggtygagtaygagtgattygtgagygagtttaygtgtaggttgatttttgtgggggygygggtayggtgggtggtaygaggggatagygtaggtatttggagtttttttygttttttgttttgyggtattgggttttttttaygggattttttatttygtttttattyggttaygtgataggyggagtttgattttttygggaagggttygaggaatygttygtttaaatttyggygattttagggtaatgtggtgyggttggggtttyggttyggatttggggtgttyggygggtaaygtttttttygttttagttttgygtttygtttgggaagaaagygtttygagattttgygtyggtygttgttygtttattttygttttttgtygaggttttygtgtttttttgygttttgtygggattttygtttttgtttttggtagygtygttttygttttygtttttattttygtttttgtttttyggggtttaggttattttgtttttttttttgaggygtyggygygygttggygaattaggtggagatttgggtgagggttattttggtgatgatggttagtatgattttttygtttttggtggggtaggggtttttgyggtgttygttgagttaggttttgagagtggtygtggygtttygygtggygtttttgyggtaygyggggtygttgagttggtaygggtaggtygygttgtygtaygggtggtagttgatggygtyggttatgtyggtggtgtgygygtygtagggtgygttttggaattaataagagtttgtgagtggagtatgyggagatttygygggtaattagttagaggatgttattttttygttygtttayggttatygtttttttygtgagtttggttttggggttgygtttttygtygtaaaagagtaggaaaaaygtagtgtgattygggattagttgttgattataaaaagtatyggagttttattttygaatttttgaattattttatttttttaaaatgatttatttttttttaagtgtttyggagtygttygtggtaatgtatataaatttttgtaygtgygygtatataggtttataggtagttttttgatatttaaatttttgtagatgtttggagtgyggttgtttttttttatttttttttttttttttttatatggttaaaaaaatattttagagtttttaatttattatttattgttttaaagttgggtaaatttaatttgtaatttagaagttagttatygtttygaattttttaaataygtygtaattagtattttaatttattttttaaygtttaaattygaggtatttgtagttttygttaaggttttagygattyggtygttgtttagaaatttygtygagggtyggtagtygygataatttygtaatggttttaatygttygtaaygtgtttygtygyggttygggtttggtttagtttagtaatttygagattygygagtygtttttaggtygtyggagtaggagttgygttygggttayggaggatttaggyggtttttagygggttaygygttygtaagtaygatatttgaaagtatggttygttggatagagtaaggtygaaatttgggygtttygggtyggatttyggagtygtagttgaatgttyggtttttgggtttaattyggtgatttttatygttttgagtttygygagtgaatgygaatygttyggtygtyggtttagaggtygtagtgaygyggattttygygttttaygttaatgtaggygagtatatagttygtttygaaygtttttttaggttgyggtgyggaaattagggataaayggygttagatttyggtttyggyggagaygtattttttaggtttttagagaaaattagtyggygagtygaggggaygygyggggggygygygggtttyggtygggtttagggaygttttygtttgtygygttgttttttttattyggggttyggtttagtttgyggggyggttaatygagtyggygatttttgagtygttagtygygttatattttyggyggttttygttygtygaattygagtttygtttygtttgagtttygtttgggtttyggygtttaggagtttygygtttygttygygttyggttattatgtaggaygggaagtyggyggyggyggyggyggygtyggtygagtattgtagygggttttygaagtyggtggtygtttgygtygtgaaggtygtygagttygggtaggggttgaaygtygagttygaygtygagygygttagtttttygttgygyggagtygttaaagtygaygygtygtaggtygggtaygagtagagygttagygagtygggygtttggtataggtagttttgygggtaggatatggtgggygyggggygyggggttygygttaygtygagtagygggtagggygygyggygttttttatttaygttyggtyggggygyggygyggyggygggtattyggayggtyggyggaggtaggtyggttygggtattagtttgggyggttygygggtyggggyggyggyggggtggyggtggyggyggtagtagygyggagtyggtgggygtagtygygygttaggtyggyggtyggggtttgggggagtttggagtygggagtgaggagttgaggaaggagygttygagttttygagggatattggaaygygtagttgtttattaygygtttatttgtatattygggggttygttttttttttgtttygttygttgtagttttygggtygyggttgggggaggggtagagagaygggagggaggygggggagggyggaggygayggaggygggyggygggagggatyggtaggtttttgtggygtagtygtttttttagtagtttyggttttagttygyggttygyggatttgtagtttagttyggtygygttgygtgtttyggygygtattttttttatttttatttattyggagttaygttttttgttyggtttyggtyggtttttatygttttyggttatygttttygtttttgttyggttttygttttttttagttattatttygtttttatttttttttttatttttatggattaggtagaggtygttygyggttaggttaggtygggtttaattaggggatttatagtttgtttygttgtgtatttygaggaggttyggtttttgtgtttaattyggaagtygtagggaagtggggaggttaggatggtggygttygyggttygggttttttttygggtagtgygygyggtttttatttttayggtttyggatttgttttgttttttggttygaggtttttygygtggtttygygtttggtygtttatttttygyggtttatttygtttagtatggatttggattyggggygttttggttgygaattgttaggagggttttgaggtgagttttttgtttttaaattygtagygtaattttyggggttttgaaygttaygattttttattgttgggaatgaygttagggttttagttaagaagaygtygttttttaaagagttttattttattttgtttttttaagttgattttttttttagatttgtgttgttaaaatattggggggatgattgttatttgataaatygtttttggtaggatttgaagttttttagttaygtygagaaygggtaggagtttaggttggygtygtyggtgtagtgggtattataggtagtttaggtgaygygyggttggagtaggggggyggttgttttgyggggtttagaagygaggyggttggygagggtttttaggattttagttttttagaattttttttttattaygtttttttaatttttttttattyggggatggtygaagagggygtttggttgtttatttygaagggttatttatggggggygtttagggggatggaagagtgttaggtttgtgttggtttattgggagtatttatttagtaggtgtttttattttyggaagtygtttygggtgggtgyggtggagaagagagagygtagtggtttggggygggttttagtttaggtttgtagtygatttttgtatttttgttggttttgtagtttgyggagtagttttagtgattttaggaygtagggtatgttgyggtttttttgtggtgyggttgtagyggygyggagggagyggagttygggttgttagtttggtttagggygtaagagaaatatttayggtattaggttgtttttttttaggtgtaagggaattagttgtaaattgtagtgttgtgtttgaggatggttttttttgagtyggtaggttttyggtaggygyggtttaggtaygttatttttttygttaggagttttygagtygagttattygttttttattagttattttatttattttttygtttatattgtttttttattattttttttataaattatatttttattttgtatatattttttttaggttattttaatataygtataygtatatatatttaygattatttttttttttatttatagatatttygtttttataggttgggttttttgtaaygatttagyggggggttttaattttgttgygattttatatgggatattttaatttagtttaggatagatatttttaattaattattatagagttgaaaaatagagagagagagaaagtagtygggttgggtaagtygtygatagtttgygatatttttgygttttttgggagggaatttttttaagaagaggggtaaatgagaggtttataygttggatggtaaatataaatattgttagattagatggtaatttttagggtttttttaygattagattagtttaaatgaaaaaaaaatygggtgtaatttttattattagggagtattggtttggagtatttttatttttaaagagyggttttygttgtggttttattagtatttggggtttatttttttttttttttttttgatttattttttttttttygtyggatttttgttaggggtagaagagaaaatagttagttattatataaatatttttagtttggagttggagtgtttgttttggatatagtygattttgatattaattaaatatataattagataygtgtagtggyggggagggtttttttatttagggtgtatttttagaaaygtygtttgtttttttttttttttagtttagtgttgggagtttgaagatggttttttttygttttgtgtgtattttttttttagtaattatatttttttattgaaatttatatgttttatatygttgttgtttgttattaataaaaatygtttattttgtattattaaatagtygatttttattatatgtygtttttattggtagtgattgtagtaaattaaaatgtttaygtagggatattaaaaatttaatattygttattgttattgaaatatataaattaygttttgttttaaagttttttgatattaaagaaaaaaattatattttttttttttaagttaaagttggtttggttttttttttaaaaaaaaaaaaaattaattatgagaaaatatgttgttagygtggagttttggygyggyggtttyggygaggttgtttgagagggtggygggtttagtttagatttygtttyggggttaygagggttgtaaggtygyggttttygaagaggagggtttgggatgttttgtttaagggygaggyggggtgtttaggtttgtggggtygttggggagagttyggtatttggtttttgaggttttttagttgtygttygagtaggagggagggaatgagtaggtaygtagggaaaatttagtaattgttttgtaaaygygatttttggttataataatttaggygatgggggtagttttaggtttttggtgggttttgtttttttttttaggtgtgttttaggaggtggggaaaaaattaatattgtttttatttttttttattgtttttgtaatagttaaagaatttagaaygagtttaygtggataygtaagttttagygagyggggattttttgygaggtygagygygaggaatagtyggtttyggaggttygggttyggggttttttyggggaygyggtygattgagaaggtyggggygttygtygggygyggygtygtttttygtgtygyggggayggaaggaggygaygtaggttaggagtygtgygygygggyggygagggggygttgtggttygtgtttgtyggttygagtttyggtaayggtgggygygatttattttttttttyggyggtttaattyggggaagaagaaaaaayggtatygaggtattttaataaaatttaagygatttttgatttttttttattgtggttttttatgagttttyggtgtttggyggggaaatagttatygttygggggtgtggtaaatttttttggtaattaagatgaaatagaygtttttatgtgggttttttttaatgaagtaatattggaaatgtaagtagttttagtgtattaaattatatygttatygtattygyggttatyggttttttygttttagggtttttygygtttgtygagggagagagygaggtaggaatagggggtyggggatatgagaagtttggttaagaaattttttttttttttgaaaataaaagygttgttataaatggaataaaatttaagttaatatggaatttatattttttttaaaygtygtttttaggtttagtattttgtgagtaggttggattggattttaygtttaatyggtatttttaggtttttaaagaygttttygaggtttaaatgtttttttggaaaataygtgtagaggagtattygtggaagattgaaaggttttygtagttttagttttggtaggatgtgtaaggtttttygaggtttttaaatgggttttygaggtttgggagattttygagtagttaygygggygttattttagggaygyggggyggyggttattgtgggtygggagggttttygtaygggttgttttgagygtttggattygggattttgygygygtttttttttttttttttygttttttttttttttatttataatttatattttagggatttygtatttagttaattagtttttgtttatttaattgttttgtttttagtttyggatttttgggaggtttttttatggttaatttgtttttttyggtattttttagygttttgtaaaatttgttttttttttatagatgtttygttttygaygtgttttttgaagtttttttttygtttagggtgtttataattttgaattttttagtatttygtygatttygtttttattttttttttttttttaatttygygttggtttygttttttttttttttttttttttttttaygygtttygttttttttttttaggtygtattttttttygttygggtygggagtttttygtggttaggygttygygyggtttaagatygaggttygttaygttgggtygttygtgggyggtttttattyggtatatygtggaaayggygygtttygttagttgyggttttagtttgggagggagygtagygyggggagtttgtagygtttggagagtgaggaaaagggatattttttggaaatggatagagtygagttttttaaagggatygtagttgaaagagattttttttaaaattagtaaygatttggtagttttagttttttaataggagatggttygaagatgaaatgtttgaaatttygtygtygttttatttttgtatataygygtayggtaggtttagattygtatagagaygtagataygygygygttygygtttttyggagaggtyggygygtttyg

SEQ ID NO: 11011 - DNA, 1059 bp, synthetic construct
  misc_feature 1..1059: note = Description of Artificial Sequence: Synthetic polynucleotide
  source 1..1059: mol_type = other DNA
tyggtttgttatygttttttagggaaygagatattgttgagttggaagatttygygggttataggtatagtttttttgttgttggyggygttgttggggttgtttggtaayggtttygtggtgtggagtttggygggttggyggtttgtaygggggygatygttggyggttaygtttgtgttgtatttggygttggtygayggygyggtgttgttgtttaygtygttttttgtggtttttttgattyggtaggtttggtygttgggttaggygggttgtaaggyggtgtattaygtgtgygygtttagtatgtaygttagygtgttgtttatyggtttgtttagtttgtagygttgtttygtagttattygtttttttttggygtttyggttgygtagttyggttttggttygtygtttgttgttggyggtttggttggtygttttgttgttygtygtttyggtygtygtttatygttatttgtggagggatygygtatgttagttgtgttattygtygtyggtttaygtygtygtttatttgagtttggagattttgatygttttygtgttttttttygggttgatgttyggttgttatagygtgaygttggtayggttgyggggygttygttggggtttygggyggtayggggygygggtgggtyggttggtgagygttatygtgtttgttttyggtttgttttgggttttttattaygtagttaattttttgtaggyggtygtagygttggttttatyggaaggggttttggygaagttgggyggagtyggttaggyggygygagygggaattayggttttggttttttttagttttagygttaattyggtgttttaygtttttatygttggagatttgttgtttygggtaggttttygtttttttaygyggtttttygaaggttttggggaggttygagggggyggtygttttagggaagggattatggagtttygaattattttttagttgaaagtggtggggtagggtygyggtaatggagattyggggggtgggatggagaaggayggttyg

SEQ ID NO: 11012 - DNA, 1663 bp, synthetic construct
  misc_feature 1..1663: note = Description of Artificial Sequence: Synthetic polynucleotide
  source 1..1663: mol_type = other DNA
tygtttttyggttttygtttttygtttttygggtggtgaaygtttgaagagggaggygtggtttygygtattttgttttyggtygygttatyggtatttatttggttgttgtygtgtttttygttygttttyggggttygagatttygygggatttygygtyggttttgygggaggaggyggyggttttagtagttgttttaggtaggyggtgttyggtagagaggagtttttttggtggtataagtgygtttyggggttttgaygtygtgtatttttatttygggygyggttttttttygggggaggttggggtgaggaggatagggaggatgaggyggaggaagaggaaggagttgagtygggggagygttygttaggaggygtttttttygttgttttygaggtygtygygggtttttttayggyggggagtaaatgttygyggattyggyggygtagygtggatttttgttyggttttgtyggygtygtygggttttaggggtttyggygaygagtagtataggttgggttgygaggaggagaagattyggtttagtatttgttttygttttttgaagtygttttatttgttgtttgtattattttttttggtyggtgtattttttgtgtttatygggggtggyggggagggygayggggtgttygtagtgyggygttttggatttttagygygttygttttygtygtttttgtttttgtttatttttagttgtaggtttttttagagtygggtttggaaggaggaggaygtygtyggyggttttggttygttygtygyggtagttyggggttttattttttattttttgttttttttttttttttttttttttttttttttttttgtttttttttttttttyggttgtattttttttygggtttttgyggygttggyggtggyggyggyggyggyggygggygtagtagtagaaatygggagtgtttagygattttaggttagttygggggaaagaagyggtygtygtygtygaggttttttggtttygggatttyggygttgtttttttttttygtatttgttggggtgggttggagtygtaatygaatttyggtygyggygtttgtaaagtttttttttygaagtttygyggttttagtttattggygttttttaggtygygttttggtttttttttttttttgatygagttygggaagttgtaygtatyggggygtgygygtttagttgygttagggatygtattyggygttttttgggtagtatttgttagyggygggggyggttgtttttaaattgggygygtaygyggtttatataataaggygygtttggttggagatttyggggattagtagtttttttggggygtttygggattattttttagtttttaggtgggagggtyggtaggagtygggtggagttaggtagggttygaagttagtttgttttttaggattyggttatagttgtttaggtagttygttgtgygttggtygttggtygygttggygatygtttgggtyggatgaagygagttggagtggaaattatgtgttttygatgggtttygtgggggygtygatygtttatattgagygatgaattygayggagttttaaagttgaagaygtttgttttygtttygttgyg

SEQ ID NO: 11013 - DNA, 2065 bp, synthetic construct
  misc_feature 1..2065: note = Description of Artificial Sequence: Synthetic polynucleotide
  source 1..2065: mol_type = other DNA
gyggatygyggygtttttagggaatatatttatttagtaatygagattagagttggagygttgygtttttaattttggggygggyggggggyggygggaatttttgtttyggttttttttgtatygygggggtagttgttatttgtaaggygagygyggygygggggatggaagtaggygtttattggatagaatataaaggtagaaatttatttygaaggtyggggttyggyggggygttgggggtgggygtttttygyggttttyggygtttttygtttygagaygtttyggtttagyggtattggygygatygaggtttagtttyggggataygttyggttggtygyggggaaggtattaggtgagygyggtygygtttttyggaatttygttttygygygtttygyggygaygyggygtttattygtttygggagttaggaatttagggttttattatggygttggtygtygtygtygtygttgyggttgtyggggtgagttaggyggyggtgttgggttttttgtaggagtayggygggaaggtgygtaatttygagttgttgagtygttttaagtygttgttygatgtyggygattygyggggtygygtygttygtagggatygttttaagtagttygttaataaygtggyggtggtgaaggagttygayggygttaagttygtggtgttgaggaagaagtttyggttttyggagttygagttygtatttttyggtttttygggggtagyggtttagtygtygaaatttatttygayggttttgtygyggagygtttttgtttygggagtttygtttttggttygggtgtygyggttagtggagtygttaggggatttgggtttgttaatagagttataggatatttygggggggtyggttttygagttygtttagtygttyggggagyggttygtygatttatygtttttagtttttgagttagtttaggttatygagagatttttygtagaygyggttttatygtttagggttttttttgaggyggtatygttttgttttgattygttagaygyggagttygggttyggggtagygaaagggtygtygtagtagaagttttgtatgttgtyggtgygttgygtttyggttttygttaygtttygttttygggyggaggagttyggtttgygtyggtagttgtyggaggagtygagttygyggagtttttttttgttgttgaggyggttttyggtggaagagttyggtttgggtttyggtttgggttygggtygtttttygtatttgaggygtttgtygygygtyggttygygtttgttgagttttgaygtygaggagttgttygtygygtygtygtygttygyggtgtttttggagtygttygagtaygagtggttygtgyggattgtygggggtygttggatttattagttgtaygggttgttgttgygygatygyggtttggyggttaagygygattttatgtttggttttayggttttgtattgggtygttaagagyggygayggygagatggygttgtagttggtggaggtygygyggygtagtggygtattagtygaygtgaaygtaygtttttayggyggttataygtygttgtatttggttgtattgtayggttaygaggaygttgtygtgttgttggtggtgygtttgggtgtttaggtgtaygtgygtgattatagygggygtygygtttattagtatttgyggttyggtttttygtaygygttgygtygtttttttggygatttaggtttgygaggtattayggagttagatgygatyggtggtggaagtggtagttttgttgttaggygtttygtataggtggtygttattatttttagttttattattagtgtatttttgggygttttggttgaygattttatgttttaggatttggttygaggtttgaagaagtygagtttttttagtaagtttttgagygtttygtttatggttttaygtaaaaagataaagattygyggtggtttgttagtttttttagaaatttttygtygatttatttyg

SEQ ID NO: 11014 - DNA, 3487 bp, synthetic construct
  misc_feature 1..3487: note = Description of Artificial Sequence: Synthetic polynucleotide
  source 1..3487: mol_type = other DNA
tygagagaaggtgagttyggygggygtagygggttgggtgggtgtggttygyggtttygggaatagatttaaggtttygttatygtyggttagtagttygatagttygttygtttggygagygtaggttttttttttagaaattgygaggattygagygtattgtttgtgtattataaggttaagtygggaagtggagtyggaggaggaggggygaggaggygaagggtggggagaggggygtttygttttttygttatgtgttagtttttggaagttatttttyggtttttaatttttyggggtaatgggaaggaagagtaaggaggaaggggtygtttyggggtaaaattttgttggggttaggatgtgtaattatttatttattygtttattattgttttttttatttttyggaaatgyggggtagygttaggygttaggaggtattygggaggggggagggggygaygagtttaatggggattttttttayggatygtttttttttttttgaggtygtttataattttaagttttttygttyggaatgttagttttttatttggagtgggtgyggggaggagggtygygttttttttttaagattygygttygtttttttattttttttttgttagtattttttgtttatttttggtgttgtaaaaygttaygtaatttattygattygtattttaaaattagygatttagaagtagggtttagggygagggttttttagygttggagtttyggggggyggggtgtttagtgtaaatttygtttttttygygagtgtygtttttaggttgttatttgtaaagaaaygtttttttgaygtagggagaaatggtaaattttaagtaygttattaatatggygttaaaagatttttttaagtataagttygtttttttttttttttaaggttgyggggggygtygttygggtttggggygygtagggggyggggtgtgagtagaaagtgtgagtgaaagagtggaggggyggggtatgtgtgtgagtgtgtgaagtgtgagtagatttgatgggatttgtaygggygtagtygtygttygggttyggttttggggatagggygggttaggggygttttagagtttatggggagttygggtttagggtgttagtaggygtggtggtggggttgygagggagggtattttttttttayggggttygtaaygttatttggatttttygtyggagttaaataattgggyggggggttgggggggyggygaygggggtgtygggagyggagattygagtgaataagaaaaaagtggttattttttttttttygttttttttgttygtttttattttatttttattttaatatattttttttttttaaagagattataaggaagttttggtttaaaaagaaatagaaatatatatagggggttggtgaatggtgtygatygyggttatygtagttggaggttattttttggggggggtgagtagygtttatggagttattttgygtttatttttagyggtatyggtttaggttttgygggtygatygttttyggyggggggygtggggtttgggaygtygygggttyggtygtttttttygtygygatttyggatggatgygygtttttygttttttygygtyggttttaggagttttyggtttygggagtatttttttygygtyggtttttgtagyggygygtagtygagggtagygttygttaggggggtatygyggagtaaggtaagatttagttttyggyggatgggttttgygtatttttaygaygttatttggygtttttgtaatagatttgttagygtttttygttttttygtttttttttgttygttygtttttttttttttttgttggttgtttgttttaggaagttagygyggagaggggggggatgtatagtataggggagagagattgygtatgttggttagtygtgttttaaagagtatagtgyggggaggttgagaggggygtatgtaataataatttttggaagggtgagtttggygattttttttattaatgattgyggtaaagygttttygggtyggygagggggygygggygggygggggygygttagggttgtaattttttygygggtttyggtygggygtaggggttgyggygggagatgggtayggtggggaggtygagyggttygggygggggtttygagaatttggagttatttgtttttttgttttttygagttttattttgttgataygtagtaygttygggygtygaatygggttgagtyggtgtatatgatttygygttgggtttaygtgtagtyggttyggttttagatatttttygggggttatygttttygttttgtygttttttttttyggttyggtgtaygygggygttgtaygygggggtagtatgttyggtttttggggttggaggttttgtataaattagatagtttttttggaggggygggggatattttttttaggtgagtgtggagggtgyggagtttyggygttaggggtgaggattggggtygggggtagtttttattttyggggtygygyggtagtttagttggggagaggygttgggagagtggaaatgtatyggyggyggtyggagyggygggtgygygttygyggggygayggtagggggygtggtttttgtttatttttttttaattttgtyggttygygtttygttttagggayggattygtagtttttagttttttgtttagggttttgtattatgggtggtattaggaagatgtyggtttgtggyggatttygtttgggaygtatatatttgatttttaaatgagtgatattgtagttttygtttttatttagygttgttgtagtttttttgtyggattttyggtttygtttygttttyggtagtggtattttttyggttttatttttttttttttttttttttttttttttttatttattygtttgygtttgyggagyggygttygttygtttttttttygtttgggtgtagatttgtggttttttatggttttttttygtttatttttgggttttgagatatttttttttttyggttaagggaygagaggggttaatttggygattygtagttgttttgttagaggatggggttgtttgygagatagttaggaaggttttattttagtttttagaggtttagttttgttttttattatatatagttattattttattygtttttggggttyggttgtttttttyggtgttttttaaatttttttttygatttgggtgttaagtttatttatttttyggygtygttttyggtygaatagttttttgtttttttttygtttgggtyggagtttttygtagtttttttyggttttttttttyggtttyggyggtyggaattaygtyggygygtttttagtttgyggtttygyggattgtttttaggggygggttggaggygygyg

SEQ ID NO: 11015 - DNA, 847 bp, synthetic construct
  misc_feature 1..847: note = Description of Artificial Sequence: Synthetic polynucleotide
  source 1..847: mol_type = other DNA
tygaggggaaaggayggatttggygtttggggttttttyggtgggatttaggtgggtggttygygtggggtggggtaggggtatttataggygtttagygttgygggggatgtttygaggaatygygyggaggtttagttygtggtagtttaygttggtagyggagtaggtatatttggtggggtaggygayggttggaggtttatttaggaygttygttagygttaaggttagygttaggygggygygtayggyggygtygatttttgtttattygggggttatggtgtgtagggtttygtttttggaggaggttgtttttgyggggtaagaygygtggagttygaggaggygygyggggagygygggyggtttggggagygggyggyggagttagygyggaggaggggygagttyggtgtttaggygtayggggygygggyggagyggggygtttygggyggyggyggyggtagtaatagtagttttatyggyggggtyggygttgtttygttgygtatygttgggagtgtttaggtgyggagygttttttggtttygttggttygygggtygggttggggatttggggygagygtaatggggygtggygttyggggaggttyggtttggggttgggttggggagygyggyggttgyggttggggtayggggyggtygggtgagttggtyggygttygttttttttatttagtgagtayggtagatatyggagaygyggggtttattttttyggttttttttygattaagaaaygttaatttygttttttattggttgygtygygygttatgtygattaagttgggaattttgttggagygatyg

SEQ ID NO: 11016 - DNA, 909 bp, synthetic construct
  misc_feature 1..909: note = Description of Artificial Sequence: Synthetic polynucleotide
  source 1..909: mol_type = other DNA
tygtttagtatagayggggtattttyggtgyggtttgttatygttttgtttggygttggygtttttagagaaggttatgtygattttttttttatttygttttagatttttttttttgagttgttttttttatagtttttttaggygttattgagagtttttygttttygatgggtttggggygtttggattttttyggggttattttgtygtttttttttagtttttttttttattttttgtygtygttttttygtttttttaggattttgygtatttaggttggttttatgttttggggtattttagtagtgttttygggttttyggttattyggtgayggagggagggagaggttggygagggggyggygttttaggttttagygygattygttttttagtttttttygtyggttatagtygygygggayggggtagggatttygagaatatyggggatttgygggtyggtggtttygggtaggttatttttgaygygggtgygaggtttttygygggygtgtayggttgggtyggagtygygtygggggtygggataygtttggggttagygttggygtygtygttygggtggggtgggtygggttygggtttagttttttttttaygggyggttygygtttygttttttagtgatttttatattttttgygtttygagttggaatttyggtaggttttgtttygggtygygygygttttttggggattagggttgtggtttttgtttygygtygtgtttttagatatygtygggygttygttttttatttttttttttttttttttatttygyggttgaygagggtygtttttaagtggttatgtttttyggtatggaygattttttagtgtttttgagggtttagggtttygttttygtttyg

SEQ ID NO: 11017 - DNA, 2150 bp, synthetic construct
  misc_feature 1..2150: note = Description of Artificial Sequence: Synthetic polynucleotide
  source 1..2150: mol_type = other DNA
aygtygygtttygtygttygygggttygtygggagattgygggttygtttygygggtggggygtttyggtttttttygttttttggaggttataggttayggygayggyggtgatygggagagtaggttgygaggygygttttatygggttatagataaattatttyggtagyggtygygtyggaattttttttaagttattaaattygtttaygygygggagagtgttggggatgttttatgygttygygattttagaagttaggagtgtgttatttttttatatatttattttyggttttgtaygtttttttttayggttygagtttttgtaaatgtttggttagatygaggtygtygagatgttygttttagttttttttttygtgggtatttagggtagttygtgagygtygttygtygtygtttttagyggygtygggttttygaatattygtygggtgagygaagtatagyggggttayggagygtttygaygyggggayggggagggtagtgttttttttataaattagttttttgggtgaagtttttggggtttggagattggagtgtagggtgtgtgtgtgtgtgtgtgtgtgtgtgtgttgtattttgattttatggaggatttgtgggagaggaggtgtaaggttttttttttagaagtttggygtttttaggttttagttaygygggaygtttttygataattygatttttygttaggagagattygatttaggtttgygtygygaggtttttagttygtttttttttgygattttaaatttgggttttgatttttygtyggtygyggtggttygggttattyggyggyggttgatagttgagygtaaaggygtygyggttaaggttttygyggagtagttygggatgygtaygtygagggttaaggaggaggtygttyggtttggagttgggatygtaggttgggggtygggatattygggtttygtygggtygggggtagggtygygggtttgatagttgttgyggttygygyggaygygygttttttgtagttygttttttttatgtttgatttattattttttgttttttttttttttgttgttttaaaatatttttygaygttagtaaaatataatgygtttyggtygtygtaaatagtygggagggagagtatatattyggygyggygyggtygtyggttyggtttttatttttttttygtttttagaaaatgttataaaagygggtagggygyggggagggyggttgygygttyggyggtyggggtttttttttygygtygtttttttaygttttttygttygtttygygygttygtttttttygtaaatttgtttygttatttygtttagyggyggggttyggggttyggggttygggatttatttygtyggagaattttgygttttttttygttttttttttttygygttttttyggttygtagttttttttyggtagtyggygaggtgggtagttygtgggttatygaaagttygyggaggggaygygtattatatggtagttygtttttagtttttygagtgygttgggaagggggaggggaaggggygaggggaggtyggggggaaagygagagyggggyggyggygggagtgggtaggyggggtggygagggyggyggtygtttaygttagygttgtgygatygtagttygggygtgtayggtygttgttgtygttgttgttgttgttgttgttgttgaggyggyggyggttyggygttgtttgtttygygtygygyggtttgygtttttttyggaaygtttatatttttaatygttatattgttgatattyggygttgaygttattygttttttatttataataattttaygggagtygggtagygtattttttyggtygttggggygyggtaygttyggygattagygtaagtygtttygygaatggygtttygggggttggggyggggggygggggaygggggygggygygygygtttygttggttygygggagggggygygttttatgtygtygtagtagtagattttttygttttgtgyggtygygyggttyggagagtttttttttttyggttyggttgatygtttygttyggtttggttttttyggttaygaaagayg

SEQ ID NO: 11018 - DNA, 506 bp, synthetic construct
  misc_feature 1..506: note = Description of Artificial Sequence: Synthetic polynucleotide
  source 1..506: mol_type = other DNA
gygttygttgttttygagtttygggtttgagtgttggttggyggagatttatagtgggtgtttygttttyggaygatgtttttgggtttttagatttagagtttygggaygaaattgttttaggaagattyggaaggattygtyggtygyggtaagggataggyggtttttgagataggaggagttaggaaatgyggggtttggtggggtgaggagtayggggttttttttttattttygyggggattttgttatyggtttagtgtggaggttttatygtttygttyggattygtggggtttygatagtgtggtttttgygaggattttttttatttttttygttttggggttgttgygggagggygttygggtagtattaggttttgagtgtttagggttyggtaggggtttttygttgtygtttttttgatttygtygtttgyggtttagggttgttggttttttygttggtttgggaggttttagtatggaygtygtgaggyg

SEQ ID NO: 11019 - DNA, 1503 bp, synthetic construct
  misc_feature 1..1503: note = Description of Artificial Sequence: Synthetic polynucleotide
  source 1..1503: mol_type = other DNA
tygagtgggaygaatttttygttagttttgggtttttttatttgtyggttygyggtyggygtyggtataggyggagggygtttttttttttttgyggttttaagttaagtggaagatttttttttaagttttttttttygaagtttygygggtttttygygttttagttttagttatagtttgtggaggyggtatttygaggttgggygttygtgyggygttttggttttagtatttttygtttygaggttyggtttygggggygyggtygttygggttttygtgtgttttagggggtttygggtygygagtygttgtygaatggtttttgataaaaaaatttttgattattaaggttagtttttttttgaaagtttygttygtttygatataggaagtagaagggagygagagttttagagygyggyggtagyggyggtttggtttttttagagggttagagttagggatatgygggygttygggatttygygtttygygyggttyggygtttgagygttttygtttttygtttyggagttgtyggyggtatgattygataygtyggggygttygygygyggggattttayggggtaagttygggyggtygtttttttttttttygygatttttayggttygygttttggtygttttattttattttttgttttagagagtttttygggygygtgatttyggggttgtygggttgataygggatttttatygtggtygaggttagaatttggttttgyggggtagggggyggttttggtgatttygttggattygatgttggttaaatttttaaggttaggtattttattgggaatttagtgtatattttaggttgttggtggayggattaygagggagtgygtygttatttgttagygtyggggttgttygygtggaygyggttttttttttggygtttgtttygtttgaattttgtaaataaaattygyggttttagtttygttagtttgttgtattygttgttttgygagtygtagygygygttttygggtattagagtttygttgggygtggggtyggagattyggattttygtaattttgggtgttygyggtttaatagttgatyggtttttttggatygagggtttattgggtttttttttygtygtttttttgttttggtygtagayggtgattttyggatyggttttggtygagtttagtgtttgggtagggtttagggygtaygggttgygygygggttgtggatgtatgaygtygaatggtttgggaattgatttggagaggagttttyggtggttaagttttygtttygtttttttgtygtttttagttttatttygygagttygggtattgttyggggttgggttttgggagaaagttttttygttttgtttagtttagagggygttttgagaagttttaggtgttgtagagaygttyggtyggaggyggattttyggggaaagtttatttttgggtatttaggagygyg

SEQ ID NO: 11020 - DNA, 907 bp, synthetic construct
  misc_feature 1..907: note = Description of Artificial Sequence: Synthetic polynucleotide
  source 1..907: mol_type = other DNA
tyggatyggtatagggggayggttagaygggatgtyggaagttaagggaygtagaggtyggygggtggyggygatggagaggatagattyggtttttagaggaggtygtgagygyggggtttgygtyggtyggaggagggattyggggggttgtaatatggttgttygggygtygttttttttttgttaagttagggttttggggagttgttgtygtttttygttygggttggggygaggaaaggaggggayggygttgyggtttyggaatttgtattgygattttggtagagtaaaygttgtatttgtagtttygaattgaattttttgtttttttttttttttttttttggttaygttttttttttttttttttattattttattttaattggttttaaaygagggtgaaagttgagtttgaggatgtygttgttatagaaattgtatagtaattaagggttggggaggyggggggggggggyggtaggttttttttttttatttttagtaygygtatatttttttttatttttttagttygtygygttttttyggagatttatatygttatttttygtygtagaaygggagggataggaatayggayggagggatygggaygaggggagggttttaygtagtatagttgtttttttgyggagygtttaggagattygggtatttttggaagygttgyggattgagttgttygyggttgttttygtttygagggtygggatagtattttaggagaagagggaygaagagggaygatagataaatagttggggagaggygggggggggyggttygtggggttygttgggttttatttagttttgttyggagttgttygaaatagtatttaggtttttgygggttaggatgaaaggtaygtgggtyg

SEQ ID NO: 11021 - DNA, 1925 bp, synthetic construct
  misc_feature 1..1925: note = Description of Artificial Sequence: Synthetic polynucleotide
  source 1..1925: mol_type = other DNA
tygtyggttttaagtaggaaggygttttyggtatattagttttttttagygtttttagygggttyggygtttggagggttaaggygggygygtttygygggtgggyggggggggggggaygggatyggtgtygggagtttygttgttttggygttttttgggtttaggtttagtygttttttgggtttttttygyggggtygttttygttttttttttgtygagaygggygtggggtayggggtygtygttyggyggggagtttattyggyggygtagaygtttygyggtttyggggagggatttggtttgggtttyggtttygygtttttttggggaggagtygagaggttgtagttggyggyggyggtttygggygggagggggttttaggaagyggttaggtyggagttttttattyggtygtagttgttggtttggttagaatygagygygttttttyggttttygtygtttttttttgtaaatygygggtaggaggagttttttttttagygggttyggagtttagaggygtygyggggygyggtygaggggaggaggaaggagagygggagygtagtyggttygggtttagtygtgattygtggggyggyggtttygttaatttgtgggygttgaygyggggggyggtttygyggygttygatatttgttygttygggaygyggggygtygagaggttyggttaggygggagttgygttyggggyggtygttgtatttgttygggatttygtyggtygtttttygygtttatttttttygtttttygttttttttttttttttagtttyggtttttygggygyggygtgagagtagagttyggttyggaggagtygtttttttttygttygttygttyggygtttggagaggagygygttgaggatygggaygtttgyggtygtygttatygtttaggttygtygygtttyggtygggatggatttataygttygatgagtttygygtyggyggttgygagygtygagtttttttttgttgyggttttagtygtttttygygygttyggtttygyggattaggatttttgggtttttyggttgagggygyggtygtttyggagaggtygagyggggaygggttygagatggygyggggatttagygtttyggyggygggygttttgtaygyggttygggttyggggatagtttyggagttggtagtygttyggtatygatggattttgattygygaggyggygtygygttygtgtttagttgtagttagaggggygygygggtagaaygygttttaggttygggtyggttygygyggttatgaagatgatgttggtgygtyggtttygygtgtttattttgatggtgtttttggtggtttgygygttgtatatygttttggatttgttgtttaggttggagygaygyggygygyggttttygggggagttyggttgttygtgygygtagttygtygtygaggtggtygygttyggttgggtttaggttyggggtygtttyggggagttttyggtygtttttttygtygtyggygaygygggttggtttaataagtataygtttygtattttgtaggattttagtttygattttttttttaatttttygttttattygttggagaaattgtygttygyggtygagtyggtygagygygttttgygggggygggatttyggygttttaagattttaygatttygygtatyggtygttgttgygagatttyggttygygtyggttygagtygtttttyggtttyggyggagaygttttttttttggttaggttgttygagtattygttttatygggtggyggtttygtygtttayggaggaggaygttttgtttaatgtgaatagygatattaggtttagttttaaagyggyggagaattyg

SEQ ID NO: 11022 - DNA, 1287 bp, synthetic construct
  misc_feature 1..1287: note = Description of Artificial Sequence: Synthetic polynucleotide
  source 1..1287: mol_type = other DNA
tygtggttyggaagtggattttgttygaygygggggtggtygttggagggtygaggatgtttatataggtttttggagggtgtgttttyggagtttgtttygttttttggatttatgggggattagtaaygtygttatatttttttttgtttttgttagtygttttttygttttttttttttggttgaggttggtaaaggtaggtaggtatgggggggyggggttttaggagggaggaggggttggtgggyggggtttayggatatttygtttygtttttagtggggtttygtattttttatatttygyggtttttttaggttagggttttttattatygygtttagaggtygggttagtygggygtgtattttaggggygtttygtttttygyggtttgggattttttagttaggatagtataaaatttttttatygtttattttttgtaaaaaatygtggttttyggyggattttggagataggaggtgtaaagggygtttataygyggttygggttygyggtygagagttggggggatttggagyggggtygggtygtaagaagattttgattttgtttyggygttggggygygtgttaagggttygyggggtattagttgtattttygaatttttgtgtttggtyggggagtttttaaggttttatttygttttggagggggttgyggaagttyggaggtgattygggttttgggaggggygtttttaaygtgggggaagggagataggggttttygaagatagygygagattyggagggggttttttygatttaagaygtggtaaattgaggtyggygaggagygaggttgagttyggggattaggyggttttttattgttttttyggttygtygtttttttgygtttgttygtaygggtagggtyggyggtygagtttagygggttyggggttaggtttgggtttygggggyggygttttttttttygygtygtttttatgttygtttttygygtygttttygttygagttgtttttttttaagtagtygttatygygtattttgtgttggggtygygggatgyggggttggygyggggttaygtttygtygtagtttttgttttattygtaggtaggagatygyggttattattagygttattagtagtatygttagtttagtttgggygtaaggagagggatgttagggattygyggtygtttygtttygtatttttttygtttatatttttygttgagataggtttttttttttttygggagtttttygggttaygyg

SEQ ID NO: 11023 - DNA, 2906 bp, synthetic construct; identical to SEQ ID NO: 6069
  misc_feature 1..2906: note = Description of Artificial Sequence: Synthetic polynucleotide
  source 1..2906: mol_type = other DNA

SEQ ID NO: 11024 - DNA, 2146 bp, synthetic construct
  misc_feature 1..2146: note = Description of Artificial Sequence: Synthetic polynucleotide
  source 1..2146: mol_type = other DNA
tygygtgttaggaaaagttgtgaggttggaaatttyggagtaaggttygattttggttagatttgtaggttgyggaatygggggygygygggygtagygtagtatagttyggttatggagtaygyggtggttttttgygttttttatttagggattgagttyggggttgtyggggagagygagagygagggygtygygttttyggygtagatattttgtagtttyggygygtttttgtgttttagtttyggggaagagttttygtygtagtttttygttttagyggyggaaggygyggttattttttygttttttagyggtggttygygggtggtggagyggtagtgggaggtyggtagygygggygtygygttttyggaggagttygygttttttgaggagygygygtgttyggaagagttygyggygtygtttttygaatygygygtttggtttgaggatttygygtttttygaggagttyggggagttygygttygtattttyggggttyggggyggtgtayggggagtyggatttggtgttggaggtgtyggggygtyggttgygygygtataaggyggtgttggyggygygtagygattattttygygygygygygtygygggaygtgttgygggtgtagggagtgagtttgayggygttgyggttgtttttygtygaygtttatagygggygtatggygggygtgyggttygataaygtggtygaggtggtggtyggygygygtygtttgtagttgttyggygtygygtagygygttatygaygtygtggggtygtagttgagtttggttaattgttaygaggttttgagygyggttaagyggtagyggttgaaygagttgygygaygtygtttattgttttatgagygattattatttggaggtgttgygygagttygtygtgttyggtygtttgtygggygtagagygggatttgttgttgygtygtygtttgygygtyggtygygtttattttttggtygyggygttygggtyggygggggagygygygggtagtyggttttagagtttttygggggaygyggaygygygyggggaygyggtygtttattgtttttaygyggyggtyggagagtggygygagttgaygyggttgttygagggygygtyggygyggggttgyggtttgtgygttttttataattattttttygtggygggyggygtggygttygygggtttygayggtygygygygttygttygattaggttttttgttataattyggttayggatagttggagygtygtgaggtttttgygttaggygygttygtagttgyggttgttggttttggayggttatttttaygtygtgggyggygagtgtttgtttagygtggagygttaygattygygygtygatygttgggttttygtggygtygttgtttyggggygttttygtygtggygtatgaggttattatttgttayggygagatttaygtgttygggggtttttttttttatygtttgtttaagtatgattygyggygygaygagtggtaggagtgttygtgtagtagtagtygygagygttyggtygatatggtggttttygayggttttatttatygtttygatttgagyggtagtygyggygaggygtaggyggyggggtygagyggggttagygtgtttygatattattgtttggttaagtagtggagttygtgygtygygtttttgygttttttyggyggttttaygggtttgtagttttttygttgygtygttttggayggygttatttattgygtgagtygygygggtatttggygtttttagtttgttygggaaggygaggtyggyggygaygtaggttagggyggyggtttygaggygttgggygtttttttggaygttyggggtgtgtttatttygttygtttttagtttgtttgagaagtygtttygaggggagtagggygtttygtaggtyggyggggtyggygggygtttttttyggtaggggtttgyggggtttaggtttttttgggttygyggaggaggaygtggtggggagtyggggtygttggttaygttggtggtttggatatttygaaggagtttygaggaygtttttagggtygttttyg

SEQ ID NO: 11025 - DNA, 865 bp, synthetic construct
  misc_feature 1..865: note = Description of Artificial Sequence: Synthetic polynucleotide
  source 1..865: mol_type = other DNA
gygttttgygttttttttttaygttatttgttagggagtygttaaatagtaagatygygygttttgyggttttagagtgyggatttyggtygygtgyggttttgatygygtygttttatttttggyggggttaygtayggaygttatggttggygtygyggagtygggygatgygygyggattttttyggggttttgattgtttttgagttttttttgyggggggygtgygyggttygtttttygyggygttaygyggttttttttyggtyggggattggtgygttgggyggggyggggyggggygggataaaggygyggggtttggttgygyggggtttgygggtagttttaattttgggttygtagtttgygttgggtgygtaggaaggttagtgtgggggtygttygatatttttttttygyggaggtgggagtygagttatattttggagtggggattggtygyggagygggttgtttagggtyggtygaggtyggggygagttttgygyggygttggagattttgtattttygggygygygtagggttttyggtygtggtygtagagttaggaggggyggtttyggagttyggygyggggagggtttaggygtagtyggggttggtagggygygatattygtttttttttatttttgaaagggttttttaygtygagaagaggggygggtatggtyggttyggygaaatyggtttgtatagattttgggaagttatygtttgyggagggtgggattttatagtttgtttatttgtttaggttgagatttygtgttttagttttggatgttttaygggtttttygtttygggtagyggygtaygggaggagaagattttyg

SEQ ID NO: 11026 - DNA, 865 bp, synthetic construct; identical to SEQ ID NO: 11025
  misc_feature 1..865: note = Description of Artificial Sequence: Synthetic polynucleotide
  source 1..865: mol_type = other DNA

SEQ ID NO: 11027 - DNA, 1463 bp, synthetic construct
  misc_feature 1..1463: note = Description of Artificial Sequence: Synthetic polynucleotide
  source 1..1463: mol_type = other DNA
tyggggggtygygggaygtttaggaagygaagyggggaaggtttygggygygtygtaggattygygttggagatgggtttgaagttttgttttgaaaaagtyggttyggagtgggttgttttyggtgtttttygagtttttatgttgttatttaagtagtagaggaagaatygggtttggttygggaagggtgggtttagggttaggggtgtaaatttttyggtaaaagtyggtaaattaaaagtygtatatattttaggtttyggtttaggtttyggyggggtagggttttygaagtttyggggygygtagaygtyggggttttygggggttaagggaayggygggattygatttttttgttttyggtttttygggttttygtttttygattagtygttgagtygggggttggggtygtygttttygttygyggttygttgttttttttyggygygygttattyggtygtyggttttttttttygyggggggtttygtttygygtttygttttttygggttgtagtyggtagtttaygtttagggagggtggagggaggaggagaggygyggagaggagggaggggagaggggagggaggaaggygagagaaagggagttgtttttatttyggattttttagagtttgtttggagygygtatttagyggttttygggttttagygttttagtygyggttygygttttttygtttygttttttttttttttttttttttttttttttttttttaggtattttygttttttttttttagyggttgtagtttttagttttaatttttygygtttatttttgggaygygygttttygttttattttttgttttttttttttttttttttttttttttttttttggttttygttttttttttttaggtygttttttyggggttygattgtttyggtgtttygttttyggttygygttttgtttygttttttttttgtattttttgagtygttygtygtygtygtygtagattygtygygggagttttagtttaattygagttygatagttattgtttyggttttagttttagttttatagttygyggygttygttygagggagtttyggygttyggggaaggttttagtgggttagygygttttygtttagtttygygttttagttttgttyggttyggygaggaaggatygggaagatgaataayggyggtaaagtygagaaggagaatatttygagygaggttaatttttaggaggaggaggtattgggyggttyggtgtggtggygggggygaygygggatttagtgygggyggtyggyggggygygggttyggggygyggyggtggaagaaggtttaggtatggttygtgtttyggaygtagttttatagtgtggttyggggagggtggatttygggagygtgtgtttttgtgtttaygygygtttgygggttttaaattgyg

SEQ ID NO: 11028 - DNA, 1437 bp, synthetic construct
  misc_feature 1..1437: note = Description of Artificial Sequence: Synthetic polynucleotide
  source 1..1437: mol_type = other DNA
tygtaggaatygaggagtyggtyggtttaggtttttaaggttayggggagggggttagggyggaaaaggtagtggagtgagggtgtygttttygggtygtgttaatttygtttygtttygtgtygtygaggyggggttttggttaygtaggaggtgygtttyggaggagggyggygagyggttayggggtggggagtaaggggygygygggyggtaggtatggaayggaygyggygtatttygtttatygygggaygttyggayggyggtyggygygygyggttygtttygagttygagagggyggggagataatgtttgttyggyggggtagtttaggtygtaygttttygttygyggataygggtygtttttattygggygagagggtagyggygggaaggygtygggagygatggttatttyggtttygygaggygyggtaggtttygttygttttttttygygttygtttggygtgygttttattyggtaagtttyggggttatagatttatttttttttttagggygtygtyggagttygygtyggagtyggtgtyggtgttgtygtygtgttygtygttyggttttaggttgtttatggtgygggggagggggyggygggaaggaaygygagggygagygyggygtyggtttygygggaagtgggaaggggygyggggagyggtgygttygygggtgyggagygggtggygggggatttayggggtagtgagaggggtagttttygygtygggttagggttatattaagtttggygggtgyggaaggtggggagggggtgyggygggggaggtagtgggagtyggaggggtygtygttttygtttttttattgygatyggygagtgygttgyggyggyggyggyggyggtagyggyggyggggggygggygtygggggagggggygggygtyggyggyggggggyggggtyggaatyggttttagttggggttyggttagttttttttttygttygtygygyggttttygggggaaygygtagttaatttttatygtttatygtgggttygtttyggtttyggtygyggggygtyggttttyggtygggttttttttttttttttygtttgggttagygttttttttttttttttttttttygygtttttttttayggygagtttttaaattttgatgaattygttyggygaatttttttaaaggggtygygygttgygygttttagttygygggaggtggagtttygtgtttygtatttagygtttyggtttttgggyggttttgttygggyggtttygygtttagggtattygtagygaggttttygggtygtygattttttttgtattttgatttagggttttggggttttygaygtatttattttgtttttaaatttagtygygtagattttagtttygggggatyg

SEQ ID NO: 11029 - DNA, 717 bp, synthetic construct
  misc_feature 1..717: note = Description of Artificial Sequence: Synthetic polynucleotide
  source 1..717: mol_type = other DNA
gyggtaggggygggattyggaggyggggygtttgtttaygtygtttagtagyggagggaggygyggttttagtttygygtttaggagtygtataggygttyggggtygtagtaggagtttttttagggygtttagygttgtatttaygagtygygygtygttttygtttagtgygtttaggagygtyggtagtagygtgtttaygtgtygtatttgttgggattyggggttagttttttgtagatttygtygygatygggttaagtttttttttattttttttttttttttatatttttttgygatttagygygaggtggtttaggtttagtaggtttaattagygtatagtgggttyggggtttttttgttaggtgaggagtygttttaggatgattttttttygtaggagtygtgyggtgggtyggttttgtaatagttaggygaggtatatggggttagtaygttygyggttttygtgtaggtygttgygatttagggattaagtttagggttattttttattatttattygggaagtaggtttatttttgtgaagaaggttatagtygtgagaygttgygggtygttygygttgygaagtygagggagtaagtttgygaagaggtttygtaggtggtggtyggtatgtgttattatagtattggggtgggtggaaatgggagttttygtttygtttggyggttttttttttyg

SEQ ID NO: 11030 - DNA, 1713 bp, synthetic construct
  misc_feature 1..1713: note = Description of Artificial Sequence: Synthetic polynucleotide
  source 1..1713: mol_type = other DNA
gygttgtagattygggttttttttttagtttaygygtaagtygggttyggtttatatttattatattttttyggttttygtttagygtygttttttttttygggtttttttagtatygatttagtatttattagygtygtttttaggtttttggtttagtttattttygggtaygtgtgagtgtgtgtttgtgttagtttgttagttttatyggggatygggttygtttatygagagagaagygttaatttttgttttagtattatttttagtttttggttttgtttggagatttagtggtttatttygtgtaggyggtagtaygtttttagtattaatttgaagttygttaygaattyggtgatgttttygtattggtygttggygaattttttttttatttgtagtagatatatgttttgttygggttgttgygggaaggygygatygtttyggttttygttgygyggttttttygttattttttttttygyggtggtaaygttttttaagggttgtagaaagggggyggtgaggtttyggtgttttttttgtaggaattygtttaggatgyggtagttttgttgtagttygtaggttagtttttgttttttgtagtaatygttttygattattatygtttttattttttttttttgatygttygygttttttagygaggaggtatttttttygtgggtyggttttgaggtttgggtygtygttgttatttttttttygtygttttttttttyggtygtyggtggyggtygttttttttttttagtyggttttatygttttyggygtttygggtatatttatgtttyggtaggtttaggttgggyggtgtggaatagtygttygaggtgttgggggaygygtgagygygagtygtttttttayggttyggtygyggygygtagttttygttatatygggtttggttttttttagtygtyggttyggttyggtgygygygggggttttgagtttatygtyggyggggyggggttatatggygygygaggaggggggagagaagaggagagtttaggtgttttttttttttttttttttyggyggyggygygygtayggttttygtyggttttattttttygtatttygttygtttgttttttatyggttaggttttgtygggtygtygyggtttyggygttttattttttttygggttagyggggggttgggagggggygaggaggaagggggtttttttttttttttttyggagggggtygtagyggyggtttyggtttttttttttttttatattttttttygtttttttttatttgygggggataygggtagaaggaggyggtgtayggayggggttyggygataattgttagttagaagtttygttgggyggtgaggggggagaaaggggaggggtagggagagaagggggagggtatttagtttttyggttgggaagagttgtggagagaagtaaagaaagaggttttgtygttattttyggtgygtatgygtagtagaataattttttttttttttttygttattatygtgtttygtttygttaygtaaaaggaagagtttyggtttagttataggtttagaagtttgttagggttgygyggattaatgatgtaattaatygtaggttaatygaatatgttgatggagggggaagtaaggygtttgygtagtttaattygttatyg

SEQ ID NO: 11031 - DNA, 699 bp, synthetic construct
  misc_feature 1..699: note = Description of Artificial Sequence: Synthetic polynucleotide
  source 1..699: mol_type = other DNA
gygygttyggaaagtyggtttgggttttgttaattattttgaaggtaaagtatttgtatttttttygtygaggttggttggyggygtygygttggaggggaggaggttygggaggaggaggagaaagagtagygggaggattygggttgggaggggagygtagggttggggaggtygatgagyggttttyggtttttyggagaagtagtygagayggtaaggaggaggygaggttttgtyggggygaggygttgtttttaygygtttyggtygtyggttgygggygyggttgggyggggagtygaggyggtygttttygtattygttygttygttygttggygtttttttttygtttygttygtatttataggtatatattttaygtttttagtagttgtygttyggttttaygtatttatttgtatttttttaaygagttatttgatggttgttagyggygtgggtttygtttyggygggygggggtyggggyggggagaaygyggygygggatgtttygagygttygttggggagagaagyggyggyggyggyggygttgygggygygttagatggggygggaggaggggagattyggtatttatyggtttagagttgtttgaygyggtttgggyggatttygtygttygggtgtttaggtaygattttagggatttagggtaaagyggttygygyg

SEQ ID NO: 11032 - DNA, 1191 bp, synthetic construct
  misc_feature 1..1191: note = Description of Artificial Sequence: Synthetic polynucleotide
  source 1..1191: mol_type = other DNA
tygatttttattaagyggatggttaagygttattyggaagtgtttattggtgggggygggaaggtatygtagtttaaggtattygygggtagggagygggttagggygtgygygaggtygggggtagttgggaayggaggaggaggggttygttygaggtttygttttttatyggttgyggtttyggttatagttagggtttagagggtttygagtttygggagyggaggtyggagtygggtttttgtagaggttgtttttttttgttttygttyggaygtggttttygttgttygaggtgtagttgtagtagggttyggyggtatatggtttttagttttttaagtygggtttttagggttttggggttgttyggttygttttttyggtygttgtttttagtttttyggttygtgttggtttttttagggattyggygtgttttygygggygtttygttgtygttttygtyggggagtygtaaagtttgayggaagaggttgyggttttygygttttagtygtyggttttygagtygtagtygggygtttttttgaygtagtygygygttttgtyggttttattygtttygygtayggatggtttttaagtggttygtygttaggtyggtaaatygtttttttagttgttgtygggygtygttygygyggtttygttagtttaygtygtygtygtygtygttggggttgtttttattatgagttyggtyggagyggtttggttttyggtygttygtagtatygttttygtygtagtaattttygygtttagtggygttattaygtatgygttatatyggttttattttaatygygtygttagtttygtgggttgaggggtygygyggttaggygygggtaagttyggggttggtagggyggtyggggtgaygayggaggaggagaggaggtygygggyggyggttgttggtttagagttaaaggaggtygggaatttgtttagattgaggygtgttttgttttttgtggtggagttgttttttgggtttgttttttttaggttgygttgatatatagttttttyggggagtgttttgttgtttagtttttyggttgygygggaaaaagygtgtatttttagttgagttgtgttagggygttttygtgtaggtttgggtattgtaggaattagtygttttygttygtttyg

SEQ ID NO: 11033 - DNA, 536 bp, synthetic construct
  misc_feature 1..536: note = Description of Artificial Sequence: Synthetic polynucleotide
  source 1..536: mol_type = other DNA
tygttttttaygtgttygygggggggggyggggtyggtggattgggygtgagttaattggttggggggyggggtattaygggttggtttygtttaggygttygygyggatttygggtggaatgaygggagggagtttyggtagtttttattttttagygatggygtygttgtgtygygtttagtttttagtttgtyggtyggtatttatygttattyggagttygtttagayggtgagatttggggygggttygaggtagyggygggaygttatttgygatygggattatgaggagttgttagattygtggggtyggtaaygagagtagtygyggtatttgttgagaggaaagagggagyggttyggygyggttggggygyggtagaggtttgttygattttyggttatgttattgttttgygtgygyggtgagtgygyggattgaggyggggaggyggggtgtyggygtagaggttttygtatttttttagtggaygttyggtgatygttttatttaaattttatatttygttyg

SEQ ID NO: 11034 - DNA, 728 bp, synthetic construct
  misc_feature 1..728: note = Description of Artificial Sequence: Synthetic polynucleotide
  source 1..728: mol_type = other DNA
tygggygttttattygtygtttatygttttatttttttattttttttattygggttttttaagtttttgatttaggygttagatttttttattatatttttttattttaggygattygttttggtttygggtgtttttagtttgygygggtygtttttagttttyggtggatattygtttttagttygtygttttttgttyggttttgygttttttggaatttttgggtttttagttttygtygtttttagaattgygtttgygtaataatggttatagtggtgagggggttttttygtygagatttggggatggggyggggygtagggaagggaatygtygyggtagtgtttgttygggggttgggttggttttatygggyggggtyggtttatttgtttttttttaygtagtgtaattgattttgttttttgggttagagatggttttgggtttygggygggagtatygggttttgtagttgtatttgtattggggggttgtaggtygttygggttyggagtatattgtggaaggttatygtttttttgtygaggtgagygyggagttggtygagaaggggtaaaggagyggggyggagyggggttagagaygtggtttttttttattttygtgttttttttagatttaygtggtttattttagtatygtttttgttagagttgaygaggttttggggygttygggaggtttggtygtgttggtyg

SEQ ID NO: 11035 - DNA, 1431 bp, synthetic construct
  misc_feature 1..1431: note = Description of Artificial Sequence: Synthetic polynucleotide
  source 1..1431: mol_type = other DNA
tyggtyggtttttttttttttattttttgatttyggtygttttayggatygtagggattgttttatygtttttttttaygtaattattagagaatttttttaaaaatatagattygatgaggagtggttttttygttttttttttgtgtygagaagggatttyggtygttaataataaagaygtttttygttttttttttttygtyggttygggttygtttttttygygttgyggttttyggtttagygtttttttttygagtygggttgyggygtttttaaatttygaggtygtaygtatttgtatttgagyggttygggtygaagygtygggtagaaggggtygagagagaatygtagtygaygygttgttttttataaggygagattygygtttygggygtygttygatttttttygtttgtagattggttygatagaggagyggggattagggttatagttttyggygtyggggygaagaaggayggyggygttttaggggtttygtttaygttttygagtttygtttygygtyggttttgtttttttataagagttygygttttgttgattaayggtttyggtgyggggygttggagyggtygtygttgttygtyggttgttttygggttttaygtttygygyggtygtggtygtagtygtygtygttatygtttttttttttggtattgtagaygttatttagatttagttaggttttttttttttttaattttgttttttttgtttttttttagtttgttaagygygaggttygtttyggtagygggaggaagattggaggggaayggaggggaygagtataatttttattgagttaggagttggttattgattggaggaaggtgttaaagttgatttyggttttagtttattagygggyggggggagagayggagtttagttttgttttatttttattaattagaggtygttyggtagggtgggaggygttttgagtttaaggagaggttgagttygtttagtaggaggyggggattgyggaaaagaagaattaataggaataaaggtttttygtttttttgatttgatggattatatattygggttaatgggggaatttttatttygaagaaagtgggatttgtttttygggtttgagaaagaggttgygyggagtyggaggggtygaggttgygtygygtggagtggtttggtttaatagtagggagggtagagygatgttttttgattttttagaagagttaygtgggttgatttagagtyggggyggaaaggttgygtttgtttttttygggttattgatagaagygttaatttttgggagtagttygttggttttttttttttttatttttttgtttgttttyggygaggggtggttttgatttyggygatgagtttttagaaaggtaaygtggttyg

SEQ ID NO: 11036 - DNA, 588 bp, synthetic construct
  misc_feature 1..588: note = Description of Artificial Sequence: Synthetic polynucleotide
  source 1..588: mol_type = other DNA
tygtagaataggygyggagttaggtttttggatttgttttgttggaaggagggtygyggagaygtaggygtttygggtygttygygttgtttttgtttgtttygtgygggagtyggggtttttggttttttggttttttggtttttgyggttygggygaatttagagygtattygtaygtyggtttyggtyggtttttagygttygggttttaygggtygygtttttaygyggygttttttagagattttttttttttygggtgggyggygtagyggggtttyggygtygygaggatttttygygttagaataaaggaatgtggggagggggtagggaggagtttaggttattgagtagttttagtataattgtygttyggaggygtttttyggtttygattygaggttttygttygttattattagattygtttttagtttyggattttygtagattttatyggttygtaggagggagyggygtattgggggtygtayggattygttattggagatygygatyggaaggtggygttaygyggtttttataggtttgggatttttattygagttygtaaagtaggtyg

SEQ ID NO: 11037 - DNA, 1203 bp, synthetic construct
  misc_feature 1..1203: note = Description of Artificial Sequence: Synthetic polynucleotide
  source 1..1203: mol_type = other DNA
aygtttaattttygagtttgtayggtgtagtatygtttattttgggtttagggtaatttgggtgtaaaygtttttgygggyggatygyggggtgggtttygggtatataggaggattagtagtagtyggtyggtaggyggagygttgttagaggtttgggttttataataatttttataggattaaaataaayggygagaygggttgygygtataatagtatattygggyggttagtygagtygggggtttyggttygyggttgygttaagttttagaattatttagtttygtgtttgtygttyggggttyggtttygtttyggtyggygtttatttggyggtgtygttttyggaagattayggygaaggtttygtgttttaygagattttttttgttgtattygaagttatttattatttttatggtygygttttyggggtatatagyggaygggygggyggygtagtgyggygtaggtattagtatygyggtttygygggttyggagygygttagygtgyggygggtttggggtagtygtagtttygggttygggyggatttttatgtygagagatyggagyggaaattggggaagttgtygygyggagttagggttagygaggttyggttyggtttttgtygtttatggttyggtttgtygtyggtygttggttgtttggygaagyggtttyggygttgtygggttaggggtgtygttatygttattgtgygygtttagagtygtataygygttttgaggtagtgaggggttyggtattttttatttttagttygtygggttttttyggtttttttygttyggggygttgttgygayggygayggtygtygttttagaattygtatygtygyggtttygygttttttygtttygyggyggygtttaaygttttygygygygttattygttttygygygattggttgtttttygygaygttygygygttttgaaggtygtagygttagtyggtttttttygtyggggaaaggagtgyggttagggtttggygttygtagttgggtagattttyggtygtttttgaggyggggaygaagggygygattygttgyggttatagygggttaygggttgygggtttygttttgggtttggggagtagattygagtygattaygtttygggttttaggtygttgggaggyggattttagagaagyg

SEQ ID NO: 11038 - DNA, 5370 bp, synthetic construct; identical to SEQ ID NO: 6119
  misc_feature 1..5370: note = Description of Artificial Sequence: Synthetic polynucleotide
  source 1..5370: mol_type = other DNA

SEQ ID NO: 11039 - DNA, 1691 bp, synthetic construct
  misc_feature 1..1691: note = Description of Artificial Sequence: Synthetic polynucleotide
  source 1..1691: mol_type = other DNA
gygtgggggagyggggygggtttggtagggaygttggtttttygatygtgggataggggttgggttgggaygygggtttttattaggagtygygggggaggggtagggtyggagtttttattttygtaggggaggggttggttygggaygyggttttttyggggygtaggggyggggtygggtggtaygtygggtttttttttayggtygtgagggaggggtyggyggygggggyggatttttggyggtttttttggttggggttygygygttygyggtagtttttygtggaggttattgttygtgttagtttttttygttgtttygttttttttygttgtygtygtygtygtygtygtgttygttttagygtttttatttygygtttgggagygaggagtygttagygttttygtttygtygtygtygtagygtttttaggtygttattygttatygaaattttttagygttygygtttttttygggattyggyggyggyggggygggggyggttygggggyggygygyggttgtttyggggygtygggtttttttyggtygtygtayggtygggattyggaggttgtyggttggagggaggttyggagygyggtygggygygyggygtygttataagttgygttgttygygaygaggtgagtgygtagggttyggygggtygggygyggggttygtaaatttttgyggggaggygggtttygygttgattttttagggttyggtyggyggttyggggygttygaaygttttattygtttttggaatttttgtaggtgtaggtygttaattgttttygyggygttyggattggggtgyggygygtttttaggagtttgaataatatttygaggtggtygtttttygaagtgtyggygygttttgyggggagagayggaggtyggyggggggtttttttgttttggggagggggaagtggtyggtaagtttagggaagygttyggtttttttttyggtgtttttttgtttgtygatttaggggtttgttgggtaaatttgygttatygygggtttyggggatyggggtggagggyggtggygggattttttygttgttggggagaagagttttatttatattygggaygygggtyggttttttyggattygggtggaagygtagtttygyggagtggggtaagyggygggygaggtggygygggtttygtgtttgtttagtttttgaygygtagaaattgttaaggaagtygggagttttagtttttygtttattttttyggtttgagygtayggttgggttgggggtatttttggttygtygagggtttgtagagygtygttyggggagagygtagatttgttgttgtttttgggttttgayggggygggtggggtgggtttygtagattttgggtttyggttttgttatttagggggattttttttaaygatgggatyggtgttyggagtggagtatggggagtgygttttygggagtyggygttggtyggatatgtgataattgtgggtygttggaggttygtttgygttgggatagggtttggattttaygtgygtygtttgtgtttygttagatyggggtyggggttygttttttgtaaggtttygtgtttttttagttagttgygttggaygttttataaaggtagggattgaygtttattttyg

SEQ ID NO: 11040 - DNA, 1223 bp, synthetic construct
  misc_feature 1..1223: note = Description of Artificial Sequence: Synthetic polynucleotide
  source 1..1223: mol_type = other DNA
gygttgttayggagatttyggtygtyggagatttygtygtagygaggttattgggtttttyggtygyggggygggagyggygtygatayggggtgttaggaggatttatygggyggaggagggggtttgtttattttttygtatttttttgggtttttttttygggyggtgaygtgaygtgttgayggygggttygtgtyggggagttgggtygttttttgttagtttygagttyggtttttttttttttttttygttygttttattagtyggagttyggtttagtgttttagagaaaggtyggtttgtagtattygttatygtygtyggtygttygtaygttygttyggtgagtttygggtgtygtygyggtygyggggtttagtgygygtatagyggtttggtttyggtttggtyggyggttygtaaggygttttttygygttaggtygggyggygtggygygyggygtygagtaggtttygaggaggtygtagttaggttyggggaggagttyggttgtttygagyggyggyggaggygygtttygtaagygggygggggttgggggagggtygttyggttgtgtyggaggyggtygaggggtttygggtyggtttygyggtygatttggggtatygygtyggggtgaggtttggygaggaggygaaggttgtaggygtgaggtgaaggtygtaggtyggtygggtygattttygttatgtaaatatyggtgagggggggggagggaygggggataagatggyggyggttyggygtttgttgtaggggaygatagagggggttgtygggagggggagtygttattttggaggyggtgtttggagagaaaatttygttatagttygtgagggggggtgggagagygggyggyggyggtagyggygtyggtgaygggtttyggaggttyggygyggyggygtgtgygygyggaggggygtgttygtttttygtggyggttattgtttttgtygttatgatgagygttygggttttaggygttyggyggtagygttatttttttgttttgtttttygtagtttygtgattggttgtagttttygttgygttttagttgagttgtygtaggyggttatygtygtygttyggaygtygggatygttttatttttagygtttttggttttgygttttttttygygtttgtagttattygagggtagtyggggtaggtggtatttyg

SEQ ID NO: 11041 - DNA, 1103 bp, synthetic construct
  misc_feature 1..1103: note = Description of Artificial Sequence: Synthetic polynucleotide
  source 1..1103: mol_type = other DNA
aygttaygygtygttttgttatyggtgttttttgagtgaygttaaaaygttttggatggtggtattgggattatggatggggtttatttagtttttttyggtttgttattaaggggaggggtygtyggtgggtttttyggygtygttgtaagttatygggtttygaagtyggaggtygaaayggygtgggtttygaagyggggtygttttttagggagtgygtaggttagygaggatttyggtgaggygagaygttatttttatttggttgtttttgttgtttttatttttttagttttagtygtttgtagtgattygtgattttygtaggtttttaaggatygttgygygagggagggggttygaggygttttyggttygtttttttttyggttttyggattygagtyggttttygggaaagagtttgttatygygttttygtagttatttttttygygtgttyggttttttttagtggygggggtaygtgggygygyggggtgygtggtaagtygtttttttttttaygttygttyggtygtttttygygygygygtttygtatatagttttygtgtagtgggtagagttyggtttygygygygtttygtttygtttttggttagtygygttygttttygygtttttgttttttttttttttttttttttygttttttaggygygtattttttttttygygtttttttygygttttatatttatygttyggyggagggggtttagttygtagtygtygtygttatygtygygtttyggtttyggtgtaggtagyggtygtygtygtygagatagttgygygggygagtatttttaygtagtaagttygtttttttttygtttgtgygygygtgtgtgtttttygttygtyggygttttgggtttygggggagyggttgtttttttgtttygtygtygtygtygttyggggttggtttttgyggtttyggttgtttggttttttagggttgggtattgyggtttyggyggtttygttgaggtygggggttaggggtygtttygggttgyggggtgygggaygagggattgygagtgygaggttttttttggtgygtgtttyg

SEQ ID NO: 11042 - DNA, 616 bp, synthetic construct
  misc_feature 1..616: note = Description of Artificial Sequence: Synthetic polynucleotide
  source 1..616: mol_type = other DNA
ayggtagttttygattgaattaattygatagtatttgtggaagtygttggttttgtgtyggggttagatygygtaattaggagygggggttttttaygtggyggaggtttttyggtttgggggttaygggttyggaggaatttgtttggaagttttttattayggtagagttttttggagttygtttygtgttygataaggggagttttagatttgatttttttagtagtttygyggggyggggtygagaaggggygggygggyggaggaygttggygggagaatgtgyggaatgtgttaggygtttttatttattttaggaggggtagaggaaggggtyggtygaggggaggggygaggggygaggtttygggyggtyggagaaaatttgtttgtttttttgygggyggagtttagttygygttttttygtttttttgygygtttttygttgtgtatygygtttygygtttygygtttgttttttyggttyggttyggttyggtygggtgtygtttattygagggagttygygttttgygattgttygattttttattygttttaygagtygggtatyggtgttaggtagggttgtygagtygttattggatgyg

SEQ ID NO: 11043 - DNA, 206 bp, synthetic construct
  misc_feature 1..206: note = Description of Artificial Sequence: Synthetic polynucleotide
  source 1..206: mol_type = other DNA
gyggygggyggttggggaagtagttttgtggtttttyggygggtgaggtygagatagagattaatttttaggyggygttttggygttgagttygygttgaataagattttttygtagttttgygtttygygtygggtgaaggggygtgtttttgtaggygttyggggttyggtttggagttggyggtyggtaygtygtttttggyg

SEQ ID NO: 11044 - DNA, 1141 bp, synthetic construct
  misc_feature 1..1141: note = Description of Artificial Sequence: Synthetic polynucleotide
  source 1..1141: mol_type = other DNA
tygtagtttgggagygygyggtttyggggatggggagggggtygggaggaggygtgyggttttgggggygygtattgygggagygygyggtggygaggatagggygggtyggggttygyggggygaaggygygyggtgttygggggagggygggtyggggygygygggtyggggygggggygygygggtyggggygggggygygyggggtyggtyggygygygggggyggygggygyggygttgttaatygtagataaaggtygttttagtgaattatgtggtgtygggggaggaagtgyggtttgtttttttttttttagtttyggggttgtaggttgagygygatgygyggagattttygygggggyggyggyggtygtgagtttygatgaggttygagygttttyggtygygyggtagygttttyggttygatggagatttygtygtgggatttagttygtaaygattygttgtygtttaygttgatttyggtygtgtttttttaygtgaagtttggttttatygtygtttatatygtgttttaygygttgtttttygtgtttatttaygtgtagttttggttggtgttgygttatygttataagyggtttagttattagagygtttttttttttttttgttttttttgggtttttttgyggatygtttttttttttttttattttaaagatttygtggyggttaattygtttagttttttygttttttggttgttttattgtttttttgtgtgtttgtagttttttatttttaygttgatgaatttgtattttaygtaggtgagttttagagaggtttttggaggygtttatttggyggggtggttttygyggggygttygaggtaggggygatggtagtygygggggygggttyggttttagggttgagagtgtagggagaaggygtyggttttggggtygttygaattttgttttgtttgygggtatttgttataggaaattttttgttatttttaaaaggggtaaggagaaggtaggggagggttggaggtygtygtttattygttgtttttggtttygtatygtgyggtggattyggggygttttttygtgygtagygygaagtagtagygtttgtataygttagttagtayg

SEQ ID NO: 11045 - DNA, 1819 bp, synthetic construct
  misc_feature 1..1819: note = Description of Artificial Sequence: Synthetic polynucleotide
  source 1..1819: mol_type = other DNA
gygtygttygtttttggtttttttgatagtygtgttttattttygttttgtgttttttttttyggatagtgttttttttagggtttatttaggagggtgtagyggtggttttyggggyggtggtygtggtgggggtgttagttgtaggggtgttttyggtgggtgggagttggtggtttttygttggtgttatgggattygtatgttygttttgygtttttyggtttttgagtttataggtygggattttgtttgttagtygygtgygttgtygtttaatttttgtaggygtagagygygyggyggyggtgatagagaattttgtttggttgtttaaatatagttttttgtagaaggattttgygttyggggaaggggaggaatttttttttttttgggygttygtttttttygttatggttyggtttttatattygtttatatttggtygtagyggggygttyggggggaggggttgaggtygygtttttygtygttttttgggygygggttaggyggggaggaggggggygtttyggtygtgtgtttaggattgttttttagyggttattygggttttagttttttaggtttggttttgataggygggyggagtagttagtgygagatagggaggtyggtgygggtgygggaatttgattygttygggaggygggggyggggygggggygtagygygyggggaggggtyggygttygttttttttttttatttatttagttgagttagggggtttaggggttttttyggyggttagttttgtattgtaggagygygggygyggygttttagttagygygtagggttygggtttygtygggggygttttttygtygttgtttttygygygattygttgtttattagttattatgtyggatttygyggttaaygygtagttggatgggattatttyggatttygaaggtgggtgttgggttggttgttgyggtygyggaygtgttggagaggattttgygggtgggtttggygygggaygggggtgygttgaggggagaygggagtgygttgaggggagaygggatttttaatttaggygttttttygttgagagygtygygygttttyggtttygtgttygygtygtttaygtgggggattttgttaggggtattygygtagattttgygygtttttataggattttgtgttygttttgygtattgtygtttgggtttttttttttttattgttgtttgtgtttgttaagygatagygattttttygagggttygygaggttgtttyggaattttttaggaygtatagttttattttgggaaatttatyggttttttttttttggtttttttyggyggttttygggtttygtttggattyggtaaygggatagggaggtygttttttattttygattgagtggatagtygygttttgttygggtggatagttttttttttttttaygttagtttyggggtygttaagttgtgtagttygtgggtygggagtatygaayggatatagtttaggtygtggtagggtttagagtgggatgttttatggtttttatttaggtttggggatatttttattygttttttagaatygggtygtgggggatagaaggggtttgygtgygggtagggagagtattttggtttttttttgttttyggggtttataaagtgtgttgggatttgyggggttgttttgtttaagtttgggtttggygttygygtttttgagtttgtgagtgygtgygtttttttgygtttttttgattgtyggtgttggggttttgygttttgygttygyg

SEQ ID NO: 11046 - DNA, 1813 bp, synthetic construct
  misc_feature 1..1813: note = Description of Artificial Sequence: Synthetic polynucleotide
  source 1..1813: mol_type = other DNA
gygtttagtttygagagtttattatagtttaygtttgggygygtagtattttttygatattgtttttgttgtgttagatagtggtagtgttgagtttaggaataygygyggagttygyggygattttygyggtygtttagttttygyggyggatttyggygygtaggagttattgggtygtaagggygtyggggagygggaggggygttgggggyggtaaggggttttagattttaggttaygaattgtttttttttttttygggtaagagtttygttttttttaattgatagaaatttattggggtaggggggygagtggggagagaggtygtttagggttygttattggttgygtttttttyggttttggtttgggaagyggttttgggtttttygggygagtagtttgggygtyggygttttttgygaggaagatygyggggtgayggtyggtattygttyggttgggtygygttgtygtttygatttatttttttttygygttygygtttttttttttttttttattaggagttygggattyggagagggygygggaggtaggtataygggttygattttattttagygtttatyggggaygygggygggyggygaygggaygyggygggggygyggggygggygyggttatggagtagtagyggyggyggyggyggyggyggyggtaatattagygatygygggyggaygagygggygggtagggtygtygggtttagyggatygaattgtatagtttagtaaaagygttttygtttttygygygtygttttttgygagtttaaatttattaatattttttaaygttttaatttattttttgaagaaaagtaaaaaaaaaaaaaaaaaaaaaaaaaaaagtaaaaaaagaaaaagtattgatyggagagayggggatatatatatatatatatatatatatatatatataaaattttttttggtttttgttaaaattagtagggttygtygygygtttgtgtgttagtgtgtgygagtgtgtgtgygtgygggygtgtgtgtgtgaatgtgattattttaggatttttygggtttyggagaygttatttttttttttgatatttttttttataaatyggtggygyggyggaggyggtagagtygggygggaagygyggggtyggtyggggygttygtygttygtygtygttttygygygttygggggtttyggygtttttygagttagggyggttagttygyggttygtygtttgatagatgtttatygttatggagttgtygtagtagtatttttgggggttygggygagygaygggagtygggatttgagygagygtyggggttagyggagtyggagtygtygggatatgggtgagtaygygyggygattttggttygggagttygggygtttagttttttttygygtygygggttttygtattttyggaatygggggygaygtgtgtgttttgtatgtaaaagtttaygtygttttgttgggtttttgattttgtattyggygggaagggggagatygggtygagggggygggatgtyggttygggygaggttgtaggagatgggygygatttyggygggtyggygggtgggyggygatgttggtttaattggagtggttygttggtggyggygatggtggaagttttgggttggagggttgggagtttattgagtttygtttaatttgatttatttttttttygtttttygttttttgtattttttttyggttttgtagtyggttggyggggttggygggtttggygttggtggagtggattyg

SEQ ID NO: 11047 - DNA, 1872 bp, synthetic construct
  misc_feature 1..1872: note = Description of Artificial Sequence: Synthetic polynucleotide
  source 1..1872: mol_type = other DNA
gygttttgttagttaagtygggtagttagggatttayggagtaaagatttaagygggtatggtttygataaagagtgaggttygttttttttttgttgtttygttagttattaaagatgagtgaggyggaaataygayggtggggagygyggggaatggaaaagttagaaggtttygtaataattyggtgttatttgaatgtttgtaaaaygtgtyggtaaaggtagttatgtttttatttygattttggtttagttgttygggataygygttaygyggyggtygttaatatttaggggatagataatagttatattgtattgatagtaygtagataatatyggygaggtgtatatttatatatttaaygataggtttygttattgygaggyggttgttaatttggagggaatagggaaagttagtygggttttagtttttttttttygaagtaygtttatttaaaygtygtagtttgygtttaggttgttttygttttattttaaagattatgttaaygtaggaattgtgggtgygygygggyggttyggyggggagtttttttttttgggtttygtyggttttattttgggagygggagggggaggagggagggttggaggaggggaggggaattttaaattaaaataatttttagttatgaggaygttyggtggtatyggatatttatattagtaatagttatattatattygttttygttagatggyggygggtttaatttttygggatttygtaaatttaggttgtgygttygagygygygtyggagtgtgggtaygygggygggttggggattgygggagyggygyggygyggygygagttyggggygagaaygggggygtggggttggggggygtygggtttatyggtttyggaygaggaggttttygttttyggggagyggtatygggtagtttyggtttagggtgayggtttygyggaagttggggtttagtygggttattattagtttttgtatggtttggggaatggyggagttttggaagtttaggaagtggygggygtaygatatgtttaygatggttygggtttyggtgggtattagtygtagtatggtttgygttttygttygttttttgygtygaygttggtyggggtyggttttygttygggtygttyggttyggttgtgttttgttyggttagggygggygggttygtttttttttyggtyggygttttttttttggtttttttttttttygygtygttygttttygtttttttygttttttyggygtyggygtagttttygtgaattygggygtattatttygggtgtttyggtttggggatygttgtygtttyggtygttgtttttttaatttttttgttttggtttgaatttgttyggygtagattggttaaggatttttttygtttttttttttttttttggygygggagaggtatyggatatttttatttttttygagttttaaaagtyggatttgatttttttygggtaagggtggygggggggayggygggtaaggggggaygggggattygygygtttygyggtygtttgyggtttygagtyggyggtagtttygggygttttyggagttgygyggyggtyggygtaggygtttttttttttygtgygaagygtttatttttttgtaaggtggtaygaattaatttygagygyggttygggyggyggggtaygatyggggatttygggtagggyggggagtttttgtygtygttgtygtaygygtattygtatygatygyggggyggggaaatgtttagtgtttttygttttttaggttggtggttttttgttttyggaattttttgygygtgttttttgtttayg

SEQ ID NO: 11048 - DNA, 652 bp, synthetic construct
  misc_feature 1..652: note = Description of Artificial Sequence: Synthetic polynucleotide
  source 1..652: mol_type = other DNA
tygtagatygtgtatttttgtagggggtttyggatgygatggagttgygygagttgaygttttgggttgggyggtttttaggttygygtygtygggyggggtttyggyggyggygygygygtgygyggttgggggygyggttttgygggttgygygagttggaggtgygygtgagygagttgggtttgggttaygygttygaygagayggtgttgtttygttattgygtaggygtttgygaggttgtygygygygtttaygatttygggttgygaygattgygttagyggyggygtttgyggygggagygggtgygygygtagttttgttgtygttygayggtttaygaggaygaggtgttttttttggaygygtatagtygttattatayggtgtaygagttgtyggygygygagtgygtttgygtgtgattttattttattyggtyggygyggyggttatttttttygtttygayggtattattggtyggtttygygaaagattgygygtgygtagagtaygtyggygyggtttygggattttygygataattgtattgagataaagtgtggtaattygagttggttggtgatttattttyggygaggggttygygtgtgggttaygtygtygtttttatygggaaagyg

SEQ ID NO: 11049 - DNA, 722 bp, synthetic construct
  misc_feature 1..722: note = Description of Artificial Sequence: Synthetic polynucleotide
  source 1..722: mol_type = other DNA
gygtttatttayggygygtgtagggttttaggtttagggagygagyggggygttatgggggtyggagtttgggtttaggtygttttttttttaattttttttgggtttttttatttygyggtttttttyggagygtggtttatygggygtgaagagygygatggttttgaggtagttatattyggtygagtygatttgtaggyggtttagtttgtttatttgtttttggaaggygygtatttggtttatgaaagttayggygygttyggyggttataggygyggygtggaggtyggyggyggttagtagyggygtygtgtgtaggggtagygtygtttgygtygygtttagtaygaagagttygttttagtttaggygtagtagygttatttggtyggttatyggtagttyggggaagaagggygygtggygygtttattttayggtgttgaagagtagtygygtygttagttygtataygttgtygatgtttagtatygygttygtygygtygttttttgygtygaagygttyggtygtygtagggtagggtttagygygtagtagttgygygattagttyggatatyggttgtttygggaagaggttttygtygttygttattgtygttagygtygagttyggggggttgttygaggaggyggttayggtattaggtagygagtgygggatgyggtygygttgtatygttgygggaggyg

SEQ ID NO: 11050 - DNA, 858 bp, synthetic construct
  misc_feature 1..858: note = Description of Artificial Sequence: Synthetic polynucleotide
  source 1..858: mol_type = other DNA
aygattaygttatygtagattagggttataygatagatttygtttttatttatygttttgagttygattaaatagtatttayggtatatattagggttttygttttttatatatatatattataatgaygtygtaaataatagtattaattattatygttygtagttttygygtatagaggttttaggttttyggttttaygtggatygatttygttyggtagygyggggttattttatygygagtttttttygtagttyggttygggttatttygattygttaggtttaatttaataattataatatyggaaaaggaagtaaaggtygaagtttattygyggttttgaggtttgtgggaaaygtagtttaataaygaaagagttttgaagtttaagyggagttygttggtygtaggggtygtattaygttttagattttggagttttygggtgygtagatttttgttattagtagaggttgtygttgygygttttttaggygyggaagaggyggttggtggtttttgayggtaaggtgaagtygaggtagtaatygggaatttaggttgggaggatagaatggggaataggaagttggggygagggtggttttgggggaggtggggggtygyggaattttaggtggtttttgttttatttttggaaagaatyggaagttygggtyggggagggtgaagggagtygyggattyggttgtttagtygaggaggaaattyggattttaggttgagggaggtygaagaaggaattggagggtygggttgggaaggtttgaagygggtatagtttttaggttggggagggtygaggggagaattyggagtttgagtygggyg

SEQ ID NO: 11051 - DNA, 598 bp, synthetic construct
  misc_feature 1..598: note = Description of Artificial Sequence: Synthetic polynucleotide
  source 1..598: mol_type = other DNA
tygaggtttyggygggttttygtatyggttttagtttttttttygtatttgtttggtyggygggttttatttttttttttgttaggggtagattttgggattatttagttygttttygtaggttttgagygtttgaygtttgygtattgagygygggygggygggtatttttagaaattttyggggygttgtaggygggataagtaggttttataggtygagtttaygagtttttygaggggtgagyggttygggttttttggygttttggtyggttagttaagygttggattatattttttagaggtayggygttyggagygttggattatattttttagaggtatygttttyggagygtagttttattttygttagtttgygagatttggaggtttygygtggggagagggtygygtttgtggaggagtttggtttygtatttgttgggttggygaattygaaattgggtttggaattygggagttagattttggattttgaattgtatttttgttaaggtaggagtgttygggatgtyggagyggataygygyggagaaagygtygttggggttattygtgtggtygtgttttyg

SEQ ID NO: 11052 - DNA, 1281 bp, synthetic construct
  misc_feature 1..1281: note = Description of Artificial Sequence: Synthetic polynucleotide
  source 1..1281: mol_type = other DNA
tygaaagtttaaagtttygggtttatyggttagttttttatttygttgttgggtyggataggtgtaggggaggyggattygtttygtagtygatttatttagttttagggtttggtygtatttgagtagygyggttttyggttgttgttggygttgtaggtttygygtttggtttgttagtttgygtagtyggtattyggtygggaagtatttttttagtaggtygtttagtattaygtttaygygtygtatttgyggtygygygggttttggttttaygtagygtttgtagattgtgagttygtagggtagygttatyggtttatgtagtagtygtyggtagygygggtagtygagtaggtygyggggygygyggggtttyggggtyggttttttttygtygggygtttygggttygtygttygggtttttygyggatagyggtyggtygygtaggtttayggygygtattaggtygttygttagtttttttagttttttyggtygtagygtttygagtygygyggygtygyggaaygygtttagggtttyggggaggyggtyggygygggttagygygttttttagttttaggtataggtygyggttyggttgygttagttyggttagtatggagygaaagagttyggttgttatttygtagtygttygygyggaaggtttygtygtttttttttaagygttgggygatyggtttygygyggtygtagttaggatattggggyggyggyggyggygggatyggttyggggtttattatygyggggttgygaygaygygggttyggagygaaggygyggagtagggaggatgygttgttgttgggaattggtyggygggagygyggttttagttttygttagtagttaygygygtttgggggyggygygttgygagyggttgagatygygggygggggygggygtttggtttgggtagygtttttagygyggtgtgggyggygagtttygtagggttgtaatygtttyggggtgggggtygggataggtatygygggygtaatttgagtttttgtttaygygtagyggttttttagtttygtyggtttaggtaatttaggtygttgyggtaaygtagtgatygygttttaggttygygttttttgygatgttttttttattygtttgagggtttttgygygattgygygygygttttttgtttgtygttttttygtagaggtgtyggggttttgggagtaggtggttttggtygygggttgttggygygtyggtatygyg

SEQ ID NO: 11053 - DNA, 1788 bp, synthetic construct
  misc_feature 1..1788: note = Description of Artificial Sequence: Synthetic polynucleotide
  source 1..1788: mol_type = other DNA
tyggttaggttygtyggtygttttagtttagtattagggygttygygyggttgttaaatattttygggagttttgttygtaaagggattaygaggtagttgttggygygttttgygygtattygtttagaggtttttyggtttgtttttygygggtttgtttygaaattgaygtgaaatygatttggtgtaatgygaatgagttttygttygttttygtttttattttagtygtygtygtygttygtygttataataatyggtttttattttttttattttaygttttgtttttygggtttttygggttataggttatagygygggaaggygtttygttttyggygtttygtattyggtygtygygtattttygttygttyggygttttygagttaygtagaggygttttttttygtyggagaygggaaagtttyggygtttttagattgggtttygtttttagttttyggaggggttggggttttttygygtgygtttygtatttgtygggggttygtattygttttygtyggggttttagggggtaygayggtygtggttyggygtttttgggaggggagygggatattttygaaggyggygygttggaggyggggagyggtyggggygtayggagagggyggggagttygygggagggggaggagggggaggagggggaggaggygygaggtgggggggagygyggygggyggtagggagggagygggagggaggtaagaaagtagtagaaagtgaggttggtaggyggyggtaaaggagtyggygygyggyggyggtaggaagtttgtgttygagaatagtagaaataagagttagggagggatygyggtygyggyggyggyggygagagygaaagaggaaattgtagaggaggaagttgygtygtagttygagtygttyggtattttygtygtttttgygttygygtygygttttyggygttttttttttagygygttttyggtygttttttygygtygygttygtyggttatggttygggagaayggygagagtagttttttttggaaaaagtaagttgaagatattaagaagattttygagtttaaagagattttyggaaygtaagtggggatyggggaggygagggtggaggtggtygyggtaggggttgtaygggtagttttagttgtygtygtygttattatygyggtagaaatttagtttgttatygygtttttattgtttygttttyggygttgyggagttttttygagygygttygaygygtgggtttgygattttygggtgggygtygttttygggagggggagggggtagygtygggttgttagggagtagtttaygygggygygygattttttattttttttgttatygtygtttttttygttgttttttttttaygygtgattgtgggttgagtatggtggggatggttgtttatyggttgtgtgygtttattygtygtgtgtatgggygtatygygttggygagaygtggttaygagaagattagtttttagtygtttttatttttgtttttatattatgtatttttatggaattggtatttgtaygtaygaggtgtaggtaagattttgggtggttaygygaggatggaagggaagggtttygtagtgtttagggttataygtgggtagagttttatyggagggtttgtgtattttaygygggttyggtygtaygygtyggggagygygtttttaagggagggtttgtgygygtygttgygygggyggtgtttttttygggttgtatyg

SEQ ID NO: 11054 - DNA, 626 bp, synthetic construct
  misc_feature 1..626: note = Description of Artificial Sequence: Synthetic polynucleotide
  source 1..626: mol_type = other DNA
tygttyggtttttygygtagtygtgggatttygaggagggygtttattaggtygygtgtgattatgtaaggtaaatagggggtttatgaagttattgaggattaatggggagttyggagtagagtttggggyggggtttggttttggyggygggygyggattggtaygttgyggatttttttgttgttttataaggyggtgygaggygagttatttttagagggttatataagggggttgaggyggtygttyggyggtygggtagygygagygtaagggatagggagggtygtggygatattygygttagttttygggayggttgggttygggttggtygtygattttygattttttattagatgtttggtagagttyggygygttyggagttygygttttttagagggaaggggtygygygtygtygyggyggttttgaggttgayggtygggaggtgaaaggtyggagtgyggggttaggaygttttttggagggggygyggygtagggggtygyggggaagtygtygagggygyggagygggaaggaaggatagtggttatttygttttygtttgggtayggggtagggattygygygaggyggtgtyggggaggtttttayg

SEQ ID NO: 11055 - DNA, 1037 bp, synthetic construct
  misc_feature 1..1037: note = Description of Artificial Sequence: Synthetic polynucleotide
  source 1..1037: mol_type = other DNA
aygaagttttygygaattgaattgagagtagataaaagtaygygtttttttttatygttaygtyggttttatttaaattygygagttattygtatttttttttaggagttatagttaggttagaagagtgyggagggayggggttygggaagagtagggaatttttagagttygtagttaaygyggaggtgggygagygggygtgygygtatttatttgtyggygygagggagtgtygggggggaagggagtggtttttaaaagggggaggggagaaggtagggggyggggagaagtyggttttttaggattyggttgyggyggygagggaggaggaagaagyggaggaggyggttttygygttygtagggtygtgttatttgttygttygttygttygttygttygttygttgygtygygttgtygatygttagtatgttgtygagagtgggttgtttygygttgtygttgtygtygtygtygttgttgtygttgttgttgttgttattgggygygagtggyggyggyggyggggygygygyggaggtgttgtttygttgttygttttgtatattygagygtttggtygtttgygggttttygtyggttgygtygttygtygyggtggtygtagtggtyggaggygttygtatgttatgygyggagttygttygggagtygggttgyggttgttgttyggtgtgygttyggttggagggygaggygtgyggygtttatatttygygttgyggttaggggttgygttgttatttttattygggtttygagttgtttttgtaggygttggttatgggygagggtatttgtgagaagygtygggaygtygagtatggygttagttyggagtaggttgtaggtaaygyggtttggaataagtagttgggagaaatttggagggtagyggagaagttygaygggyggttggattttayggayggttttaggggyggtagagtygagattttggattaaattaagggggattgttgttagygggaygyggaagttaggttyg

SEQ ID NO: 11056 - DNA, 977 bp, synthetic construct
  misc_feature 1..977: note = Description of Artificial Sequence: Synthetic polynucleotide
  source 1..977: mol_type = other DNA
tyggatttgayggagtaatgtaygtgggtttttgattygtaatatatttagttaaagtyggtttttattgttaagygygttagtagtttatatttattgyggtygyggtttgatgtggtgatgtttatygygyggtttttataatgtagggatttttttgagtggtggtygttttygttttagttttyggttattygtagttttatatygggttattggtttattatygagatagttagygagtttaggyggtttttgtagygttgggagaggaatgtgygygaaattaattagagygaaattagtyggaggagtyggtygaggtgtaggtgtaggygtagtttygtttagaattttttygttatatttaagggagttggaagttygggagggtgttgttttttttttttaggaatagagggttttgaagtgttttttttttagtatatagtygttttyggggatttggatygtayggyggtattataaatttggaggaggtatggaggtaagygttttggyggygtttttattggtaggtggaggtttttttttttttgtgttgtttttagtttygggtatttatttttttatagataggattatattttttagygttyggtttttttgtgtttttaaggtaggagggttagttagyggtygggagggaggagtggtagtagagtygattgtttgyggtyggtttgygaggygtgtaaggttygaggtgtttagtaggtgttatygtagttttagggttgaggtttggggaygataggttttggaggygyggtaggtgtagagygtttyggtagttttagggggtgtgttggaggggaatygtyggtttgtttggatttttygagtattatygaggattttygtygggatttttttataattttaaatyggtttataatttygttagagatgatagggttagggaattagaaatyggyggattagygttagggtyg

SEQ ID NO: 11057 - DNA, 6206 bp, synthetic construct
  misc_feature 1..6206: note = Description of Artificial Sequence: Synthetic polynucleotide
  source 1..6206: mol_type = other DNA
tygtttttttgyggtaggygaggyggggtgtaggtgtgagtggggtgggaggaaggggaaaggatyggggtygtygtagtttttttggttagtttygttgggttttgttagtttygtttgagatygaggygtayggattagyggtygttagtattttataggtggaggatattttttgygttttaaggttaatgttatttygatgggtttygtgtygttttgattttttttgatttaattttttggttatgatttttttattttttgggtttygtttttgttagttttygtygaygtygtttttttygtygttygttygggtttttttattygtttttttttttttttggttygayggttttattgaggtaaaaataaatagttttgagggtattttaaggagygtgtagtggtttygayggtattttyggggggataaaagaggtggttagttaygtygtyggttttyggtygaataatgggygygtagtagattgttagggggtatttgaaattygaggggagggaaatatttgagygyggttttttttygygaggaygtaygaygtagtttygyggatygttttttgttygtttttttttatgtattttttttttgtgtggaattatttaaaygggagatttttggtagttttatgttaatgygtygaataaaggtaayggttygygggygggaggttyggaaggtgtttggggtygggtygggyggggtggyggttaggygggttgygygtgtttttygygtgtttttgggattgatataataattttttatttttgtaaatataaagttttttatyggttygggtygggygtattyggygtagggaggygttggttttttygggyggygggtattgtagyggtaaygtayggtttttgtyggttgtggttygggggattgagggtygggagtgggggtttttgtgaagttagaagagaagtttgtagtagagtggtgatgaggggygttgatattttatttttaaygtygaygtttttaaaygygatattttttgyggggtgagaatgygggttygttyggtttttttygtgaggttagggttttttgtttttttagatattttaaggagttaattttttygtagaagtttttygtttttgtttttatttttaagtttygygttttttataaattttttgttgttttgattttgatttttagtygtggtgagggttagagtgaatttyggygygtttttygayggtattttygtatattaggataggagaaattggagggtttggggtttygggtttygtagtygtyggaggaagaatttatygyggggttygtaagggaaagtgaagaggttygggatttttttaaagygttggttaggatttygaaggaaggggaggagttatttgaagtyggggaaggttttttgggtgttttgttttggatttttatgtttattgattttygygaagtttttttggaggggggtaaattygygttgttttttttaatttaattttaygyggtttatttttygaatygygtgygttaaggtyggygtygggggygtattgtgatggygttttgttttttttaggygaagataaatatttygattygatgtttttatgtatgygggtgtataggttttgagaaaattaygtagaaggyggttgygatttayggttygggttgggttatatttgtttggaggtygttggtgtgtgygtgygygygtgygtagtttaattttttttagtttygggtggtgaaattagtttttaatattagtattttttaagtttttatttattttgattgtattygtttgaaagtagattttatttaygttagtaagattggaagttataaataaagaaaaagaaayggatttattgaattttagtattttagtagygtttaatagatttttttggttaaatttagagttttgtttgaatttatttaygtaggagttgttttgttttttttgttggtagaggtgtyggttttttatttttayggtttatttataattatgggtgttgttatttttaaaggatttataaggtgattaattttttgttatttgttgaatggaaggagtgttatatatgtaagatygaatggggtaggtygagttttygttttatgttattttataatttagatgggattygtgattagaaaataaaattggttaaagttgtttyggaattttttttttatttttaattttattagtattattaattagagtttaaaagagtaaggaaataatattagttatttttagatagaaatatgtttataaattttagataaatttattttaagatttttaatttttggggagattagtatttattatagtatttttaaaattagggtgagattttttaaaatatattttattatatgtatttttttttttttagtgtgtgagttaaaatattataaatataaaattattaaatattttttttttgattaattaatttgattaattttttaattaattaagtttaataattgtttttattataatttatgatttatgtggattttatttttatatgtttaatttttaygttagggtatttttagagggaaaatttaaaataattaaatatttttagtggaattaagygtaagtaaaatttagtaaaatttgtttggtatataaagttttgtagaaaaatgttttttttttttttaataaagtgatattttttttatagtatatgatattttatgtggtttggttatttgttttttagtgttggaygattagggttattaygtattygtggggttttttgttttgtttttygaagattttgttttttgtgttttttyggggttgggttggatagaggatggaggtaggyggtttagtttgggtttaaayggaayggtagtggaggtgggggtgggggtgggggyggggggaattttygttgttgtttttttttggtggtataggggaggyggtttgttttttyggaggttttagtttgttttagagtatagattgtttttttttttttygtttagtaygygttttttttgygtttagattggtygygatyggagtttaatagtaggaggttaattttttttataaaggtgaagggggtayggtttygtgggggttgygtttagataggtagtttttttatttygtagygttttgattggagtttttgatttagtatttgatgttaatyggtaaataaaatgttygttyggaatgaaaatgtatgaggtygygyggggaggagaaagttaattttattggggygtaygaggtygatygygygtttygggtttyggttaattygattyggattaatygagttttggattaygyggaagtttygggyggtttgggtygggtttygttaaagatgttatttttaagtttttaagaatttaaaagtttagaaatttaygtttttttgggaatttagtttagttygttygygttttaatttygygttttygggagattgagaaggtygtgttaatttttttttaaattygaaagaaattttttttagtttygtgggygygyggaggttgygagtataaatatygttttyggttattgttagaaggtygggttttttgtttatatttggaatttyggggaatttttttgtttggttttttgggtttagyggtttattygtttaaggttygggyggaggtygttyggattttgttgttttttyggatttttgtttattttttaaatattaygyggagttattgygttttygtaaygatttttttygtatygtttyggygygttttygtttttatttaattagygygtataatttttttttyggtttyggttygyggattgaatttttttgatatatttggggttattttttttttttgttgttattttgttagygattygygggtaattttygygygggaggggggygtgtattgtygygttgatggaygggtttatttggyggtttygygtttttyggaggagagatataaagtttaggtaygtgygtttttttatagagaagtagtagatygtgaagggaggyggggtygggygtgtgtttggatygggyggggyggyggygtygggyggggygattaggggygygygygggggtttygygtttttaggtatatttgtygtatttatygggygattttygagtttyggtttttttttggtygttttatygtttttttattttgttaggttgaggagttgyggaygygttgattggttttaggggaagygggaggygagaataatggtttttttttttygttaaaagggagyggttgtygggttyggggatagggaygygygtgtagggygtagagttgggtygagtygtygtyggygttaygygagtttygtagtygtygygttygggtaatgggtygggggtattgagggtygtyggggtygagygyggaggggggatygagttagtgtygtgttttygggtygygttaatatgtttygyggttttttggtgaagygtagtaagaagtttaygttygttttttatygggttygyggyggygaggayggygatygygtattgttgttttygtttagttgygggggygttygygtygagttttyggygtygagttyggttttygggtygttgtygtygtygtygttygyggagygygtttatgtagygttygtygtygygtttgtttgygygtttgggtygtagttattttygtagggttygygggtygygtatttyggtaatttygaggttgygtatttygygtygttttatagttttaygyggttygtgagtygygagtaygagaagtataagtatttygaaygtagttttaatttgggttygtyggtttyggtygagtttttttttaygttygtygygttgttyggagggggyggyggyggyggygygagyggagttggyggaggyggtatttgyggyggygattygttgtttttygygttygtygagtttaagatgggtayggygttttyggttggygtygaggyggttygyggttygggtttyggttttttattgttttttgtygtygttttgyggttttygggaaagyggttttygttttttatygtygyggagtygttygttaaggtagttaaggtttygggygttaagaagtttaaggttattygtaagttgtatttygaggaygaggtgattaygtygttygtgttggggtttaagattaaggagggttyggtggaggygtygyggggtygygyggggggygyggygyggtygttgggygagtttatttgttagttgtgtaaggaggagtaygtygattygttygygttggygtagtataaatgttygygtatygtgygtgtggagtatygttgtttygagtgygttaaggtttttagttgttyggttaatttggtttygtatygtygttggtataaatygyggttygygttygtygtygttygygygtyggagttagaagtagtagttagggttgaggygygggaggtattyggyggyggtagygatygggataygtygagtttyggyggygtgttygagtygggtttygaggaygggttttaygagtgttattattgygttaagaagtttygtygttaggtttatttaygtaagtatttgttggygtattattaggygttgtaggttaagggygygtygttagygttttyggtygaggatttattggttttgtatttygggttygaygagaaggygttttaggaggyggtyggygayggygagggggtyggygtgttgggtttgagtgygttygtygagtgttatttgtgtttagtgtgyggagagtygttygttagtaagggygtttaggagygttatttgygtttgttgtaygtygtttaggtgtttttttgtaagtattgttyggttattttttatagttygttyggttttaygyggtatattaataagtgttatttattygaaaatagataggtgatttttttgtaggtgttygtgygttyggtttgttagagygygttttttatttyggttttygaattgtgttttygtttggagatttataaagagagtgygttttgtatttttygaattygagttygygttgggggagtttygttttygtttttatygggtgaaagtgtygttttygtttttttyggtgtggygtgayg

SEQ ID NO: 11058 - DNA, 574 bp, synthetic construct
  misc_feature 1..574: note = Description of Artificial Sequence: Synthetic polynucleotide
  source 1..574: mol_type = other DNA
gygtttttttttttgttygygttttyggttttttygttggtttttgttygagtttttagtttttttgtattataggtttttggggtttygtttyggattyggttattttttaggttyggagtagtygtygtggaggtygttttttygygtttaggggaagggaaggyggtttyggggttygttgyggggtggagggattygygttttttagtttttygggttygggtygyggggatygtgygygygtttttttttygggtaaggtygggyggygggygygtygyggtttttggggttttygtttttttgttygttatygtttgygggagtttttggtttggaggggttyggggygygttggygattgygggttyggygataggggyggttggtggygggaggatagtgggaggaaggtttygttttaygygtttttttttyggatgtgattygtyggggtttttygtagtyggggygagyggtttggaagttyggaggaggggtayggaattgttygatggggatgygatygygggygttagaygaattgtttttatattygttggygttggyg

SEQ ID NO: 11059 - DNA, 3438 bp, synthetic construct
  misc_feature 1..3438: note = Description of Artificial Sequence: Synthetic polynucleotide
  source 1..3438: mol_type = other DNA
tygttggtggagttygtttttttgaagtyggagttggygagtttttygtatttgattttgtaggygtttttttygygggttagtygggatattttttgtttaagttgttttatttgttgaatgagttgygtttttttattttttaggtggtgtttttgttggaygygtttatatttgtaagattgggygtagtttyggttttttagggttygtygtttttgttttaggyggattatttygtttttggtgaagtttygtaggtggyggtttagttygygtayggatatggataygagttggtygtyggagaagyggttttttaygttgtygttgtygttygtygtygtygtygaggtygtygygtgyggttygggttyggggtggttagtgggtagttgttgygtygggttagyggygttggayggyggyggygaygtttggtgatgatggtgatggtgygggtgagygtgygggtttagttygtygtgggttaygtyggygttygggtaygtgtggtgygggtgagggtggtggtgatggtggtggtggtgagygtygygaaagttgtygaagttttgtagyggttgtggtattgggtgygagtygatgagygtttttatygygttttygggygttaggttgagygtttyggggtttatttgttggtagttgttygttatttagtatagattttygaggtgtgttttttgttyggtygggttgaagttgggygaygagggtayggagttatayggagtgttgagyggtgtggaggatatygagtyggttggttgtaggygtgtgtagggtttgttyggaygtttygygygttttagtggttttttttttaygtygaatttgagtaggtygaagtygttgatatattttatggttagygggttggtgggtagttttggttttatgtttagtttygyggttatygttgaagygaggygtagtygtygttgtygttygggaaattttgyggtyggtyggagygygtygagttaagygygggggggaagagyggagaagagttggggaggyggggagygagggygtagygggtyggggtygtyggttaagtttttgtttggggaygyggyggygygtyggagagtttygaggttgtttgtatygttttagagttttgggttgtgttygygtagggatygggtygggtagagtygggyggggtggagaggtaagyggagygygyggtggggttgaggggaggygtggggygagtgttygttgttygttttttagtttttttgtttttaygttttttygttygtagtygttygtagttyggyggtgtagttgtgttggattyggyggygtygtagttttttatygttttttgatgttattggggtgygggggttygggyggttyggtgygygggttaatagttgtayggttttygyggtttagyggygtagggyggggygygtttgatagttttttygtttttygygttagttgattggyggttygagyggtttyggagyggyggaggtttggyggagygttggagyggagtgggayggttagtttgggtttattttygtattttgtaggtttyggtttaygtaygttygtttggagtgygygttttatttttaggttaaattatygttttttttttttygygtattttttttttttagttttttttgtattttatttttatttygtgttatttttaaggaggtttagaatgagygtygggataaygttttttgggttttttgtttttaagyggttttygtttagtgggygaygttttgtgtgttttygyggtttttggtygtgtgtgtygtgygtttttgtttttggagatttgygygtatttgtatgttggggagggygggttygaggtttygagagttgtgtttagatttaatttttaattttaggggattttttttaggttaagygagggttttttttggygggtgtagtygtagagttttgaggttygattttattggtttygtygtttttygygtttattttatygtataatgtttatagtgaaggygaygggaaaagtagtagtttaaaggttttgaatttttttttttygttataygtayggaattttgagttttyggagtttyggggtygaggtyggttygggayggtgtttygagtagttttttattgttggggagtyggttttgtttttgtttgaaygttttgtaaygattaagtagatttyggygttagttygtygyggagaggtttaaataggtataaagtgygattttaagtggttattgtgygtaaaggygtygygatygttyggtttayggtyggaaggtttggayggygtttygtatttagttaggttttttttatttggtttaatttaagttagtttagaaygtatattatgtgtgtattagagtttaggataggtttttttygagygatgtataggttttygggtttygttttygtatttagtygygagtttygagtygygagtttygttttggtygtttygttgaaatttygtgttttagygttygggggtgttygtyggttgttttttgggtyggaaggttttgggyggaggaaggtyggtagttaaaagtggaagygttatagtgaagyggtttagggttatygggtgagaaattttttyggagggtagayggggagatygaagtatatygtattaggtatttagattgggtttgggagtygygtattttttttatttagatttaggatggttagaattaaygggttttttttgagatttyggtttaggygtygaaatyggatagatygygaattygttggattyggagattygattygtttttygygttatttttttttttttagttttgggygygygtagygaaaggtaggagaggygygtattgggtgagtgagtttyggtygttgtttgygttggattagttygattgatttygygygtaggggtygygtgagttatatyggtgtagaygygtttagattatttttaaatgttagaaggtaaaatatttgtttttaattaatttgaaaattttttatttttttgygttttyggagaggttggggtayggygtggtattgggtygtttatttttaataaaatgagtgtattttaattaaaatttaatttaattttgtggggtggtaaattaaatgttggaagagygygtttataatttttttygagaagygtgtttttygtagaaatgagtyggtygtttggagagagagtttgggyggtgtygttgygtagtttttgttagtagttgggggttggggattygtattttgtaaatgttttygttttgtttgaaygtagtgagagtatattygtttttagattattygggatygggtgtttyggatttgtgtagattatgtatggtttyggttttaggyggttagggygggataagtayg

SEQ ID NO: 11060 - DNA, 4088 bp, synthetic construct
  misc_feature 1..4088: note = Description of Artificial Sequence: Synthetic polynucleotide
  source 1..4088: mol_type = other DNA
aygtttygagtatygattttatagttayggttatygtttttyggttttygtgatatyggygygtttgttgtttygagtaggggaggttttgtatttttatygtatttttttygttygaagataygaaatttygttygggygtygtaaataattygaattyggttttttgatatttatttyggygggygygygtygttgggagggyggggtgggtggttggaggtaaggaggygtatagtaggggtaagygtygtygtygtatattttgtaygtygtttagggttatattatttatygaaaattgggaggtaggtttgggaggyggggttgagygtttatygttttgggygygttygygtttttygttatygyggttttygygttttyggtttaygttygygyggtttyggtatyggtttgtatttttagggtgygyggyggtttatttgggtgygttttyggtgggtygatttttygygtttttttttyggtttataggggtygttgttatgggtyggttttttgaagaggttggggygttatyggggtyggttagaagttttgtttttyggyggggatatttagtygygtyggtatygyggagygggttgygttaggtggttggtyggygyggygtttttttgttttttggtttygggttgyggygyggyggttggagygagtttttgtttyggygyggggyggyggygggyggtyggtaggygttgttttgygtgtgagtgtattttatttatatgtaagtyggggagygtyggggtttttygyggaagtgygagtygttyggygtaggtaagagtygtygggttygggataaggtaggggygttygggygtygttgttttgtttyggggygttttygggtattttttaattttttttttttttttttttttattggygtgtttaagagttaaattaaggagygtttgagggtaaatagatttttgttattygygtttttgtatttttttttttgagttgatattttttggtgttttttggtttttygttgttgttgggtgttttttggtttgtttttgtttttttttygtttgtttattttttttggygttaatttttaggtagttagtttagtagttygaagttygggtagtygygtttygyggtttyggggtagygyggygggaatygtagttaagtttttygatayggggygtaygggggtygggtagttygaggtygggggtaagtagggagttygggttaggygygagtygagtttttygaggtggtygggttattatgttgaagatggttatgaagtttaaagttygggyggyggagagygagaagaagayggtygyggyggttgtygaggtggttgtygaagttgyggyggyggttgyggygttggtygagtygagagagtygttygygtygyggaagagyggggatttygagaagttygygaagaattttaagaattyggygygggaggygtttttygaaaagtttttaatagataaggagygtaagaagttygagaagaagttgttggagtagaggygaaaggaggagaagaagaaggagaaggagaggaagaagatggagaagatgttgaagaagaagaagaagaaggtgttagaagtttaggaggaggttygatgtttygaggtygtygtygtygyggtygtygtygaygaygatgagggygtygaggagggygtygtygggggygtygaggagggygtygtygtygggggtaygagtagggtttgggttgattgggatayggattygagygaygaggaygaygtttattaygyggygtygygygttgggggtatygtgtggyggttygggtygtttaaggttggygygttgagygtttatttgtttttygtggtgtttttggttttttyggtgygtagtttttygtgggtgtttaattttttgttgtagaagygtayggagtagggtygyggttgyggtttygtgttyggggygatttgttgttttygagtgtttttgggttgygttttttttttttatttgggyggtygygttaagygtagaggtygygggygtttyggggttagaggygttttyggttygggttatggygttyggygtygggggygygaggagyggtttatttagttagattttttatttygttatygttattagatattattatygttgtgtagtgtgggtttttattygtgttygtgtgtgtgtgtggatatattttttttttyggttgttttgttttttggttygtgttygtttygttttttttatatttttgttttttggttttttgtgtttttygttttttygaaaatttttttaagttygggygygygtttttttttttttygtttattttagtttttyggyggygttygygggagggggaggaggtttygggggygtygggygaygyggttyggggggtggagygttggygtygtgygaggggtygttattggygyggagaygtttttttttttttttyggtttagtygggttgttgttygagttyggggggtggggggygttttttyggttygtttygttttyggtygggygygggyggagggatttttttttygggttttyggggggtygttttttttygtyggttttygtttttttagtygtygtygtygtygyggtygtttttyggtttttttttttttttttttttttttatttttttygtygtygtygttttttttttttttygttttttttygttygtygyggygtttttggttyggggyggyggygggggttyggtygaggtaataagagyggyggyggyggtagyggyggtagtagttttygtagtttttgttttggttygtttyggttyggyggyggttattagttttttyggtttyggttygaggggyggggagttgygygygtttttyggttygatygatattttttttttttygttygttygygygtttygyggttygyggttygtagttygtttygygygttttttgtygaggagtygagttygygttyggttygttygttyggygttgtttyggttttttyggtttgygtgaggtygttygygttygtygtygtygtagttyggtygygtttygtygtygtygtygtygttatgggttgtttygggaatagtaagatygaggattagygtaaygaggagaaggygtagygtgaggttaataaaaagatygagaagtagttgtagaaggataagtaggtttatygggttaygtatygtttgttgttgttgggtaagggygggyggggggygtyggtttyggttygggggttttygaagggygtttygtaggtygygygygtygagttygtttttygtttygggygygygttttygagtttttygttygttygygggttttgtttgtggggggygaggtyggaagggggatttaggggygyggattyggtygggygggggtttaaaaayggggyggggggtygtggygaygygggygygggtttttttttttyggtttgttygtttagtgttttttttttgttttygttttygtttttttttttttttttttttttttttttttttygygaggtttataygaygttaggggtttgggtgygtgttggggagggggagggggagtttatggggtttyggagattgygataaaaagagggtttyggggataggaaatygggtggygggtagagggagggggattygttttygtggggtgtgagatttgttgggagagggaaagaggggaagaaaggggygaggagaggagggggtgaygttggggggygtygtggtggyggagggggtttygttaaagggaggttttggyggggagaagtggtygaggagagtgggggggttggtgatattagtttttyggaaaggatyggagyggtaaaggtggtgtagtgggggggagggggygtaagggagtygtggygtyggagtygggaggggggyggygaggggaggagggagggyggttgtygttgggygygatttggtgygtttygggtaggatygattgattgtgtgtgygyggagtagaygtgtttygggttaggtygggtyg

SEQ ID NO: 11061 - DNA, 522 bp, synthetic construct
  misc_feature 1..522: note = Description of Artificial Sequence: Synthetic polynucleotide
  source 1..522: mol_type = other DNA
tyggttttatttygtttaaagtyggatttygtttagtttygtgaaagygaaggagtattagygttttttgatttygtatagttttttyggtagagayggttygttttttttaagaatyggaagtyggatagygttaggaygttttattttttttatttgggatttagagaggtagyggttaaggatagggttttygtygaggttatygggtagygtttaggtttyggtttttgggaggggagtagygggggaggggtayggggaggggygagggyggggygygtttgggtttyggygttgggttttttttttgttygtttygggggatatttataggatttttgtagatttttgtygaggtaggatggaggtttgtagggatgtatygygggttygygattygggyggtyggaatatagttttttttggtyggagatyggttyggtygtgagtygtgtttgtgttaggttttttaygttgtgttttagggttttagtgttyggygygtygggggttgtatyg

SEQ ID NO: 11062 - DNA, 2260 bp, synthetic construct
  misc_feature 1..2260: note = Description of Artificial Sequence: Synthetic polynucleotide
  source 1..2260: mol_type = other DNA
aygttttyggaaagttttttttaatgggaagygatttygtygttgagttaagygttygaattttttttttygyggtagggatatyggttygggttaggtttgyggaggaygttttygggygygtatatatagttygaggaygygttttgtattttaagaygtagggtyggattttatttygaaatttggtttttatagttttaggtygaattgtgtttggtttttagttttygagttygagttttaygtygtaaagagatggggttttattgtgtttagttggttttttagtayggaygtgtatttttttttggtttgttttttgttaaaaatyggtagtgygtttygtttttttgtttagtygtagtttgtygttttttagataaaaagyggygatygyggttyggttattygagtttygtygygttgygtttttgttgggyggtttatagatggtgtttagtayggggtygygtygagggygggggygggaggtygygaagagggtygggygggaggggaggagayggyggagtagttaattygygygyggtttattagttgatygtttttgtttatattaggtgtaygtyggttgyggggagtataaagyggggygtatygygggygtyggtaaygagtyggtgaaygaggygaggttygtgygttygyggttgtaagygttygtttggyggggagaggggtygayggygttagttygggyggyggtatttttaggygtttggggygttttttttyggatttggtygttygttgtttygttttttgtattttattttttygatttttttttttagttttgtttttttttgttttggtttttgagagtygattgagtttagtttygtgtagtagyggttgtttgtgtygtygtttagttttyggttttggtgttttttygggggtgttttaaggagttagtgygygttgygggttgggaaggaggygtygtttagttagttttttttttttttttygttttttttttttttttgttgttgttgtygtygtygtygtygtgggtgtygggttygygygtattttaatatttttattagttgggtttyggggtaagtttttggtyggtygygtygyggtaggaggtgtgggaggtagygaggggaagtygaggtaaatttggtggygtgggagattttayggggtttggggaattttagggtaagatygygggtttgagggggaygagggggygyggtttayggagttggggaaaatgaygaagtygggaaaygagaatatagtgtttygttttttttygttttttttgttaaaaaaaaaaaaaaaaaggtgtgggagagygatagttgggaaggtaggttagatagaaataggtaaaaaaaggtagtgatyggagtygagtttgttggattttaggggtygattaggggagggaggtgttyggggayggggagggaggagggttgtygggatgtgaatyggggaaggtagttggggttggagagtagygyggaaagggggtttagggagttggaaagagggttaagaggagggtaaggaaggtggygggygayggggagaggaaagaaaaagggtgttttggyggtggttttggtaagagaaaggggtaaggggtataattgataaggtattgaaagtattgaagttagagttttgggaaggatttatygaattttyggyggtttaygyggggatagattttagttygtgagttttgagttttaygyggggatagattttagttygtgagttttgagttttaygyggggatagattttagttygtgagttttgagttttaygyggggatagattttagttygtgagttttgagttttaygyggggatagattttagttygtgagttttgagttttaygyggggatagattttagttygtgagttttgagtttagaaggagtggtagttttaggaygtttgttaggtggtttggaatgtgagggaagttttagtttygttaggaatagagttggygttgagttttyggttyggttygggttagaagygaggaaagtttgtyggygagtgttttttgtgttgygtggagaggggtgtgggyggtygtygattyggygttttttygtygttygtttagggagtttttgtttggtaagttggggttyggggaaaagtttagtagygagagggtygygtgtttygggayggttttaggggagttygygyggaaaygyggattaggygtttyggttyggatgtyg

SEQ ID NO: 11063 - DNA, 1502 bp, synthetic construct
  misc_feature 1..1502: note = Description of Artificial Sequence: Synthetic polynucleotide
  source 1..1502: mol_type = other DNA
tygygggayggagatagggagttgggaggaaaygtaaygygttttttaggtaatagatttygagtttyggttyggaaaygtttygaggtagaagtaagggtttttaagggtttygttttttagttttgggtttttattattattttttttttagattyggtgagtttaggttgatggatygtgtagtttagtttgagttagtttagtagtttttaatygggygggtagggaagaaggttttttattgtygggaagaggttagygygttttaagtttttygtaaatttygtttttttygtttggtayggtttttttgtatygttgtgtttygtttttaggtttttgttygttaagaatgtttgtttygggggygygttygttggttaggaatttgtyggtagttttygggaatttttgaggatgyggaggtgggttygagagttgyggtttygatgtyggggtgggagttaggtaggtygygygtygtygtagttttgtygtagygygtgttttggttttttyggatygaaaaggtygaagtygtttttygygatygatttygygtaattggttygggtttgtatttagatggttgtgggttttatagggatggtygggygggttygttyggtygttattttagggtygttagttttygygygyggtygtttttygttaggaagggtggygggttyggaaggttagagatgttttagtgtttttygygtygttaygtatttagttgttygygggttttatatggttgyggtyggagggttygtattaggatygtygtygtttggggaagygtttttttgtgggtagggygyggygggtagtgyggaagttygaaagttatyggagttyggggtaggggyggygygatgtagaggyggygttygggggtttttagttgtttgyggttyggttatttagtygygattagagggggygggggaygtaggaatttyggygttygggyggtgtgtagtygtagatttattttaagtttttaygtagttgygagagtttaaaaattgttaygtgtaygtygttgttgagtgggaggaggtgtttgttatygygtttaaaaggggygtttyggtgtttttygttatgtaagtaaatggtatggttttyggtygtttttgaataaaygagtgtttygaattttttattaggagggattaggygtataattattttygatatttttygggtatgygagaattyggttttttttagtggggtttattaatgttgttygggaggtaaagaaagtgatyggttaayggttttagygtgggttttttttttttttygtttttttttttaataaaggaygtayggagaataagttttttagtttttatagatgaggagtttaggagtygggygaatattaagtatttattgtgtgtttgtttttttattttggggaggttgggggttygggagtgaagggggtagygagatygygggttgttttaygtttatygtyg

SEQ ID NO: 11064 - DNA, 510 bp, synthetic construct
  misc_feature 1..510: note = Description of Artificial Sequence: Synthetic polynucleotide
  source 1..510: mol_type = other DNA
gyggtyggttttggaagaggtgggggygaggggtygggggtttataygttttgygatttttttttatgagaatgggygggggtagtttygggaagggtggyggatggagtygttttttttttaggattataggggygttttttagtgaaggygtygtaggaaaygttagtttgtgtygtagtgtaygtagaggygttatgagttygagttttttaygtttagggataaattgggagtygtgattgttaggtygygyggaggttgttttggtygtttttgyggttaggtgaaggygtagaggtagggaggtygggygagygtaggygggyggagagtagattaygyggaagaggtygagagagaaagyggggtattyggtygggggggttatttataagggaygttgggtaygaaggaggttggggygaagatgagtttaggggttgggttgagagygttgygtagtygggttgagaagagaagttgaygagtgattttygataagggayg

SEQ ID NO: 11065 - DNA, 940 bp, synthetic construct
  misc_feature 1..940: note = Description of Artificial Sequence: Synthetic polynucleotide
  source 1..940: mol_type = other DNA
tyggggygtaggtaggaggtattggaagyggaagygagtggggagttygggtagagggagtygtttatttgatyggtttygtttttttyggggtttgttgtagttgagggtttyggattagygattttagaagtyggttyggggtygggtagtttaatagtttttygyggattttttttygttggygygtagtagyggygygtggattygygygygggttygggayggygygagttygggtagygygagtttttgygyggtagggagtggygtatgygygggygttttgygagttygttggggygagtygagtygyggyggygtygggagtygggyggyggagttgtgaagaagtaagyggyggtaygggagtagyggygayggataggtggygagttttygttygygtygttaggggttgttgggttattygyggagtttygyggtttagaygtggygggggtggyggyggtatttyggayggtttgtgagggatgygtygtttattgtttygygtygtttgatygttttygtttygattygyggtgygttatagtygggttygyggtygttttygtygygttgtygttyggtygtygygttygyggggtygygttyggtayggttatgtggatttttayggaggaggagaaatayggygtaggtaggtgaggtttaggtttggtygtggygggggttttgggggaygygtttagttttyggtttygtttggattygtattttygtgttttygttattgttygtaggttgygyggtttyggygtggggygagygyggggtgggggtaggtgygggtgygggtgygggtgygggggtgggygygggtttttgtgtagagagggyggtagggggygttggyggtgyggttttggtaggtgyggttygygggaggggtgggtaaggttygggtagttgttyg

SEQ ID NO: 11066 - DNA, 2718 bp, synthetic construct
  misc_feature 1..2718: note = Description of Artificial Sequence: Synthetic polynucleotide
  source 1..2718: mol_type = other DNA
tygtygttagttatgatttatgttttagtagygttgggaagtgggtygagggaattgaggtyggggtgggtgyggaggtggttttgayggggagygtygatttaggatttggttyggattttgagttyggtaggatttgtgygtaygtaggtagygtygygtttttttttaggttgygagaggttgttttgttattaggttatggatttygagtygttygtgttgygygygygygtgtgygygttttygtttgygtttatgtttgygtygggggaggygaaggaggttttagttttagaaagagtagtttttggaatttattatttaggtyggtygtygttyggtttygtttygtaggttgtaggyggttttggagggggygttttygtygagygygygtttygygtygtygtttyggattttttttyggygtygygygggtaggttygattaggyggtygygggtttyggttttyggttagttttttagggttygyggttygtttygtttygygygttygtttygttgygtaattygatttaagttggaagtygatygtaggyggtygtattygygtttagygtagggyggyggyggyggyggyggygtagtttyggygagygaggyggyggtygtayggttaagygtggatygyggggggygttygygttygggagtagtyggaggattygyggyggygtyggygtttygttygggaaagtaaagttggagayggagggagygygygggygygggggttyggaggagyggyggtyggygtttyggygygtygagttttagtyggtyggatgggaggyggagygttygggtygtygtygtttgtygtttgygtttyggttgggtttygggatygyggggtygtttaggtaygttygttygggygtygygtygtygtgggttygaygtyggggygtttttygtgagtygggtygagggyggggtygygygaggatttygggatttgttttttttttttygtagtygygtygtygttygtttygggygttttttgttttgtatttataygttyggtagttgyggggagttyggtagttaygtttttyggygygtygttygyggagttattayggtygagggtyggttgttgggygtygyggttttyggygggygygttygagtagtaggyggygatgygggygtygatttyggttggggggygttygagttgtygyggttgygtttyggttttaggagggayggygtagttygygggaggattatggygttttyggygttggyggyggygttggyggtggyggtagyggygggttttaatgygagyggygygggygagaggggtagyggyggggttgttaatgtttygggggttttttgggggtygtygygyggttagtattyggygggygyggtggtagggttggttgtygtggtgggtttttttatygtttttatygtggtgggtaaygtgttggtggtgatygtygtgttgattagtygggygttgygygygttatagaatttttttttggtgtygttggtttyggtygatattttggtggttaygttggttatgtttttttygttggttaaygagtttatggtttattggtatttygggtaggtgtggtgyggygtgtatttggygttygatgtgttgttttgtatttygtygatygtgtatttgtgtgttattagtttggatygttattggtyggtgaygtaggtygtygagtataatttgaagygtatattaygtygygttaaggttattatygtggtygtgtggtttatttyggtygttatttttttttygtygttggtttygttttatygttagttygayggygtygtttattygtagtgyggttttaaygaygagatttggtatattttgtttttttgtatyggtttttttttygygttttgttttattatgggtttggtttaygygygtatttatygagtggttaagttgygtaygygtaygtttagygagaagygygttttygtgggtttygayggtgygttttygattatygaaaaygggttgggygyggyggtaggygtaggygagaaygggtattgygygttttygttygtygaygtggagtyggaygagagtagygtagyggtygagaggyggyggygtyggggygygttgyggtggggygggyggyggygagygggygyggaggggggygygggyggtgyggaygggtagggggyggggtygggggyggttgagtygggggygttgatygtttttaggttttyggggttyggtggtygtttgtygygygttagttygygtttygtygagttttttttgtygygtyggygtygggygygtagtagygtgtgtygtygtaaggtggtttaggygygygagaagygttttatttttgtgttggttgtggttatgggygtgttygtgttttgttggtttttttttttttttagttatagtttgtayggtatttgtygygaggtttgttaggtgttyggttygttttttaagttttttttttggatyggttattgtaatagttygtttaattyggttatttatayggtttttaattaggattttyggygattttttaagtatattttttttygayggaggagaaggggttttaggtagtgattygtattygtttgggaattttggatagtttygygttyggggttgggtagaaggggyggttyggayg

SEQ ID NO: 11067 - DNA, 2661 bp, synthetic construct
  misc_feature 1..2661: note = Description of Artificial Sequence: Synthetic polynucleotide
  source 1..2661: mol_type = other DNA
gygyggttttgtttygygttttttttagttagtatttaygtgtttttatttattttatttaggttattagttttatygttygtagygggttagaagattygataaagygttttttattttgtaggattagtgttyggttttygttgttttttygttttttttttgygtagatttaaggtttgattyggttttaaattttaaataaaagttgtgggtttgtttttaagtgatggyggttggagaaaattagagttgggggyggtatagttagggtgtatttttgyggtgggtyggttyggygtatttatagtttttagttgttagtttaggygttggggtygtagggattgaatttygtatygttttygtagttygggtgygygttttatyggtyggtttgtttttygyggttyggtttatyggtggtagggayggtttygtttgttttagtttaygttygttttttttttttttygtttgtggttttgttygtttttatttaagtttttggtggtttaaygtatttttgtagagatatttattaagagatagygtgtgtattttgtttttygttttayggaagaatttattagtagygttatttagttttattygttttaaagtayggtattttttagtttaataaaaagatygaaggygaaatattgtgggtttttgttygygaattaatygtttagttatygaattttttaaattgatttatttggaataagttattttgtttttttattttttattttatatatatatatatatatatatatatatatatatatatatatattgyggatygggggtttagttaygtatatattttaaaataaaygagggatttattygggatttttagtygggyggtygggygttttygttttttttttttttttttgagttttttagggattygttaygtttttyggaattggggtagyggttygtttatttygtgttygttgttggtygggatgattttagattygtttattaaggaagatttgatgttagttaaatygttttttttttygggatgattgatttyggygaagattttttttttttgaggatygttttygtttttgaaggggattatttygttygtggygtagagtttygggtttttttygtygtygttatttttttyggagagttggggtatttyggyggttttgtaattttygtttygttgtgggagtattygygtaatagtaggaaagatagaggggtaatttaagggtgggggaggaaaggagagttggaagggttygtgtagtaggatagygggyggaagyggggygggygagygyggggtygtyggtyggtagtyggagtagttgtygyggygttygaatttyggyggtygtygygttttttygtttygyggagatygaygtaggygttygttttygaggtygaagggtattgggyggygagggttgyggtagttggygatttygggggygtttgygyggygygygttagaygaggttgtttyggyggttatttygygatttygygtygtygggatttgygygyggagaaygtyggttttggagggagtaygtttttttaaagtgtagaggagggttyggyggygygttttygyggaaattttttttattgtagttatttyggatgtygatttagtagtttgtttttygagaaaagagaggggatttgggtagaagggtttygtttgttttaaaagaaggtgtaaggattagaagataaygaaaygtttattttttgaagggtgggaaaaaaagaaaaagaaaaaggagttatttaygttggagatgttygttttagatttttttatttttttttttttygtttyggttttttttttygaggtttatttaatttgttagagaaggaggaggagtagaagatgggggtygaggaggaggggaagagaaagagaagtttgttaagaataaagtttttgtyggtaagygyggggatttygtagtggagggtattgyggagtttyggggagttatagygggggtttygggtttaaatgtttttgttyggagttygagtygatatatatatttagttygatttttttttgttttyggttygagttttttagtttggttygtyggttygtygttttgtaygttttygtyggttagttttgttaaagtaaagagttgygttttttgagttygttyggtygaggggaggggaygtttygagtttggtygygtgygaggtttygggygygttttggtttttyggttygagagygygtagttygggtttttttttygygttttgtttygtaggtgagyggttgygtttttttattgtttttttttttttygygtttygtyggygttgaaaagttatttatttgygtygtttttttttttttttttttttttygtttttagttttttttggttgttygttggaggggaggyggggggtgagggggagtyggygagaaggaggtggtgattgagggtttttttttttttttttttttttagattttgtaggaygagttttggttttggggtgtgtgagtgtggtgtgtgygygygygtttggagggaaggattaggtaatttggygagagaaggaaggatygggygttgtttataatttatygaaaggtaygttttgttygyg

SEQ ID NO: 11068 - DNA, 801 bp, synthetic construct
  misc_feature 1..801: note = Description of Artificial Sequence: Synthetic polynucleotide
  source 1..801: mol_type = other DNA
gygaggaaaattgaygttttattttttyggattttgttygagaagttgggggattygggttyggtgtygaggtgtggttygagtttggtattatttaygtyggtygggtgatttyggttttttggggttttygygtttygttagtaggygaygttgggaggttggggtaggtttagagygaggaygggttyggattgggtagtggggatgtattagggtygggtgyggygggagayggttygggaggyggaaggtygyggatttgttygatagaagagtagatgaggggagatygaggaygttygggttyggggagtttaygaggaggttaggatygyggggtaaggaattygygggtagttattttygttaggggtagggttyggttagttaggygygagaaggttaggygaggtygattgygyggggtgaagaygttaggtygatagttgygggttttatygttagttttgaygygagtttgygttttggygayggyggagggygggtagggggygygggygttgttayggygtttgtttagaatyggtygggaaygtygygggygggttttttyggtttttygtttttttagttttgtttttaggttttygttygggttttttaagttgttagtygygttygttttygggtttttygttttttttttygygygtttttttttttagyggtygtyggatttttttagtttattttttttagttaaygygtttttyggaygttgttagtttgagygtataggtattgggyggggtttaygggggagtygtttaataatyg

SEQ ID NO: 11069 - DNA, 311 bp, synthetic construct
  misc_feature 1..311: note = Description of Artificial Sequence: Synthetic polynucleotide
  source 1..311: mol_type = other DNA
tyggttttygtttyggtggttttaggtttygggttttgtttggyggttttgtttttaatgyggagttggyggttttgtagtaaygtttttgttagtagygtttattgagyggttttttagttgttgtatygtttttagygtttaayggaaygtttttygtaygyggagtttataagttgtttgtgtygttattttttyggttttggtatygttagtattttttaggaattttttaaattygttttayggtgtagaayggtaattgtatygagtttttgtgttaattagtattttygtaatatygttagtyg

SEQ ID NO: 11070 - DNA, 1048 bp, synthetic construct
  misc_feature 1..1048: note = Description of Artificial Sequence: Synthetic polynucleotide
  source 1..1048: mol_type = other DNA
aygggagtaggtygggttgtttaygayggaagtttygattttggttggggttgtyggtygggtagygygggagagttagggttagagtyggggtygggaattttagtttygtygtttaygygggatgtagygattatygttygtygttttygggtyggtatttattttygtggaggggtagyggygttagtatttggtygyggatttyggttttgggggagttaagttygtagygttygyggtygatgygaaaygtgagyggggygtygyggtygggtttttgtatygttaygttgatgagygtygtgtagtatttttggttygygttgtttgttygtgtyggttataggttgtaggttagtagggygagygyggygagtygggtagggttygttygtttygygtagtttatygttttttyggtagtygtygttgttygyggatygggtttyggggtyggygtttagaggyggggygggygyggttygggyggyggygggagygygygygygyggtttgygyggggtygagttygagygyggtttttttggaygtygyggtttygtygttygtygtttttaygtttattgttygtttgtggggaygygtttatgggttttyggygagggyggygttttaggtygtaygygggygttttttyggggttttaggagggttgtagaagygtgttttttttattttttygggtyggttttatygaatgggaggygtttygtaaggaygyggygggggaggggaagggyggtaygggaggaagygtttygaggagggttagyggaatataaagtttttttygygyggttgtygtttgaggygygtgttygtygtygtttygttttttygttggtttagyggtaaygygtaggtttaaggygtagtttygtttygagygtatgygtgttagggtttgttygttttygttygtttgtaygagggttygggtagtygggttagtygttggtgttggttgtttttttgttaggygtgatagtygtagggygtggagttygggagatttgygaggayg

SEQ ID NO: 11071 - DNA, 301 bp, synthetic construct
  misc_feature 1..301: note = Description of Artificial Sequence: Synthetic polynucleotide
  source 1..301: mol_type = other DNA
gygaaattygttttygtttygaagaagggttttaagaaggtygtgattaaggygtagaagaaggayggtaagaagygtaagygtagtygtaaggagagttatttygtataygtgtataaggtgttgaaataggtttatttygatatyggtattttttttaaagttatggggattatgaatttttttgttaaygatattttygagygtatygtyggygaggtttttygtttggygtattataataagygttygattattatttttagggagatttagayggtygtgygtttgttgtttttyg

SEQ ID NO: 11072 - DNA, 1395 bp, synthetic construct
  misc_feature 1..1395: note = Description of Artificial Sequence: Synthetic polynucleotide
  source 1..1395: mol_type = other DNA
gygaatygatttgtatttttttgtttattaggaagyggtygtygtygtygtaattgttggygttgatygygtaygattggaaagttgtaattttatggttygaggggtaggttygggttgagtaggttttygagtygttattgttaagtatggggtattttaggaaggagtttatttttgtattgtttatttgttattgagtgatttggttttgygaagttyggygtgattgtgttaatttttttattttttttatggggtyggagaagaaaaatgatatgaatgtatagtgygtaagagggggggygggagggyggaggaygttggaggaggggtaygtgayggtgttagttaatggttgagttttttgtaaaagtttgtyggttttygtagtgatggattatygttttagtggtatttaaattttyggygtttygtygtttaggtgaygygtagtygtttttttaggtagtttaggyggyggtagttgttgyggygattgtaaaggtygatttggagtgttggagygaagaagagtaaaagttgygttttgygygygttygatttygttgttygtttygttaggttttygggaggtgggggttgggaggygtttttygttttygttttttttttatygtttaatgaaagatgaattggygagaggtgagaagggaagagggttttyggttttttyggggygggaattagtgggttagagttygtygggtggtygtaagtaygtyggtttagttygtagygygtttagtyggaaggyggggaattyggttgatatygygtttygggtttttaggttattttttttgttttgaggttgggttgggagatygtggggttgtgaggagygtatagaatygtggtggagggygaggttgggttatyggttttttaagttyggaatggagggggaagagygtagagggttggttgggaggaattygggtgggygtgaaggagaygagggtaagaaaagaaatttttttttttttaggagggttttygaaattttttttttatagtttttttygttattagtatggtaatgaggagtttttgtaattygatttggaggggyggatgagttttggaaatttagagttygtyggaaaaggtygggggyggtygggttttttttttttattttttttttttygtygtttttygttttttttttttttttatttagttttgtatygggagtttttygggatgyggagttattygatygtyggatttttaggggtaggaggygggggagagagatgaygttggyggaygtggttagygygggggtygggyggtgygttgtaggttatttgtyggygttttgagatttaggagttttygygttttygygtgggttttatagggtyg

SEQ ID NO: 11073 - DNA, 766 bp, synthetic construct
  misc_feature 1..766: note = Description of Artificial Sequence: Synthetic polynucleotide
  source 1..766: mol_type = other DNA
tygggtttttttygttgtggttygtttgtatttttgagttggtatttgtttttygggyggttagaygttygtttggtttttttttyggtttyggtttttttttygyggygttttaatggttttygtttttygygtagggttaygattgtttttyggtgttgtttatttatgaygtygtygyggggatgttgagtttyggygggyggttggaygtttttaagtagagttygtagygtggtttgayggttygygagygtttttagaatttggataagaaggygagtttygagggtggtayggttgygggygygggtttagattygttgtataagaatagygttaggtgagagygggagtygggtyggygggtgggyggggtttyggttygtttagaaatagygtygggtgaggaaggggtttggagttttttttttggggtattgtgttgggattttgaggattggggattyggagggagggtaggygtgtttttaattygttgygtyggaayggygtttgatgagyggygggttyggataygaggggayggggtygatttgtgggyggggttttggygtygtattaaaatygygtggggyggaggtyggtagaggtygygtagygggtttagggtagggagtggttttgattygttgyggaataatatygttagttgtgggyggggtttattttgattttattatagtagtttaggtgttagtggagtttgggagggatayggtgygatygatataagayggggtyg

SEQ ID NO: 11074 - DNA, 691 bp, synthetic construct
  misc_feature 1..691: note = Description of Artificial Sequence: Synthetic polynucleotide
  source 1..691: mol_type = other DNA
gyggtaaagaggtyggatayggaatygttygttyggtgatygaagagayggygaggaggagttygygaattygtttttgtttaggtttygtttattygaygtaatttgttygtttttttttatttttygaagggtggagtttgaggtttygtttttaagyggttttttttyggagtgtttggyggttagtagggyggggtaggaggttgggagagggaygggtgygggggtgggggagaggaagggagyggttaygtgtgaggggyggttygaggttaygtgayggagygtyggagyggagggagtyggggttgggagtttttttgagggaagaggagtggagtaggggggaygyggyggyggygttgataatggtgagtgygyggyggttagygygttygtttttygttttygtttyggagygygyggygggtyggttaatygygggtygggygtygtyggaggaggggaygggggagtagggyggggagyggggttaggtttgtygggttatttttgggtttgggaaaagttggyggygttattttttttyggtttyggygaggttygagtatttaygggyggyggygtgtttttttggttatgtyggagtttttgttygygtttttygattgtttgttggggttttggttggggattyggatttygtttttgygggggttggtygtyg

SEQ ID NO: 11075 - DNA, 1024 bp, synthetic construct
  misc_feature 1..1024: note = Description of Artificial Sequence: Synthetic polynucleotide
  source 1..1024: mol_type = other DNA
tygggagggygtagygttygggtggggagttygagttagtttaggtyggttttggttttttgatttagatagygtagggygygagggatygygyggtygagttygggtygygtygtttttagtatyggggtygttagttaagagttygaggttttttygattyggatgtgatgaaaaagagtaatagagggagaagtgttttaggattgtaggagtggaagaggggaaagagaggtagagagggggaaggttttttygtaggggagtyggttggagtgagttggttggaaagagggggyggagtgygyggagttagagtygttatygttgtygtagttgtygttattgyggygtttgggttgagtyggagggaggygggaggaygygtaggggyggtygtygtygtygttaggttatyggggygaaaatgyggtygttgtyggaggttygttaatttttyggggtggaagaggaggaggaggaggaggaaggggtttggagygattayggggggatgyggaggtaggtagtggttttygggyggggaagaggaggggtttgatttttattttyggggtttttttaaattygatttttttttttagttttttttygttgggtttatttyggatttttgggatttygtygttgttaatttgygttgtaatagtttttttygtaagttttaaattaaaattttttyggggtggagtttgagggagggaagtggagggggagggaaygtttygtaggggtggtgtgtttttttttaaaaatatttttttttttaattttgtatattttttygttagaagtagttagttttttgtatttagtattttatagtttttttttygtgygttttgtygggyggygagttaggyggtagyggygyggygygggttyggyggagyggtttatgttyggygygggygaagttttygttttygggttygtggggtygtagygygtggtygaggygggyggyggttagttgggttttatagtttagggtgagtgygyg

SEQ ID NO: 11076 - DNA, 1339 bp, synthetic construct
  misc_feature 1..1339: note = Description of Artificial Sequence: Synthetic polynucleotide
  source 1..1339: mol_type = other DNA
tygtttttagygtttttaggtttatttttygtagatttttttygggtygtttttttttgttttattttaggygttttttttttttygtagttatatygtggttgtattygtygttttttttttyggtygttattatttyggttttttagaattttagtttttygygttygtagtygygtttttgttttttygattttygtatttttatttggttyggttttttygtttttttttyggtttttttttttaggatatttgtgtygttttattttttttattatataygtattttttattttaattttttygtttttttgttttttttttttygtyggtttttttttttygttgttgtttygagagttygatgtgggagggaaggygygggggaggggaggtygygaagggggttgttttttttygggtttttygtgttgyggaattgtagggttttttagygttttttgtttttttygtyggyggygyggaagtyggggtttttyggaygttttygatgagggtatttatttttttgtyggggatattttgtagayggttttaatattggtaaatattatagagaattgatttygttyggtygtygtyggtttttatttttygggtttttygtttttygttttygttygttttygttygttttttyggygttttygtygygttttttygygttygygtygygygttttygtttgygtagtygttttygygttttagtaygttyggtyggygygygygttyggtatyggttttatttttatttygtttttygttggttygygattaagygyggttattgttygygaygtagttttygttttttggyggttgtygggttttagtagttgtaggttttgyggggttagyggyggygagttgggtttttgggygagggttattttyggggggtttgggtaygygggygagygattgygtaaggagygygttyggttygtagttttttygttttyggygygatttttygttttttygtttgttaagggtgggtttggggtagttttttttatatttgtaattyggtaattttttttttygttygattgatygtttgttttttttggttygtattttgtgttttgatttttygttygtattttttttaggtttttyggttgtttttttgtgttgtgtaggggaygygygattatttygygtttgtttyggtygtygttgtgtaaygtayggtttagyggattttgtatttttttagaygggggagggggyggggaggaggttgttttatygtttygtttagtaaatattagggattygtgattatttgttygttaagattygyggyg

SEQ ID NO: 11077 - DNA, 2273 bp, synthetic construct
  misc_feature 1..2273: note = Description of Artificial Sequence: Synthetic polynucleotide
  source 1..2273: mol_type = other DNA
aygyggtggtattggtggttgtyggtagttgtygtttgtagagtgggtgagatygagtgtggtagatggtttggttygyggtgttggaggggattggyggagtagaagygttttggygtygggtttttgtttttttggagttggggtttggggaatggggtyggttattgtagggatagaggagagggtagggtaatgggtgygtaggggttttttttaaaggttgygggtggttaggggtgtgygggggygttgaggtgyggtygtygagagattttggtttttagggtggtygggtttggtatggattttaggggatggtgtatatatyggatyggaygggttttttttttattttyggatttttyggttgggtagyggttagggagaggggygatttaygggggygggtgtggggaygtyggattaygygttaggagttttagatgggtttagatttttatttttygtttygggtygtagtgaygttagggttyggaygttttyggaayggttttttgggggygttttagttttayggattygtagggagttttygtygtaatttgtatggggtttatttgtatgatttygtttygygygggagtygggggygtyggygattggaggagttattgttaatttttaggggaaagtgggygaggygatttttgggtygtttattttattttattttttagttygygtygtatttggggtttttttttatttaygtttygttagggyggggtygygggygtagatattygygggtataygtaygaygaygygtataygyggtygtaygyggtttttygagttttttgyggygatttygatttattttygygggtgyggggygyggattygttyggtttagtttttgttttttaggygtttttttttttygygatttgtttyggtygtattygttttygttttagtaygygaygttgttyggygygatttttgttttttyggtttagttttatygttgttttygatttaattttagttgaaygttygtagttttagttttattttyggtttagttttagygtttttagttttattttyggttttagttttagttttagygtttttaggtttagttttagttttatttttagttttaatatttttaggtttattttyggttttagttttagttattttagttttagtttyggtttagttttagttttagygttttyggtttygggtttagttttagttttagttttagttgagtattttyggtttygtttgttyggygtttttttttgtgyggygttttttygttygtattygttygattttttggaatttttygyggaygtyggggtttttggaggyggttttttttgtttttgttttygtttttttttygyggygttttygttttttatttatttttttagtttygyggggaygaggggagttggagggagttygggattyggygyggttttygtaggyggygtttttttttygttttygaygyggtygttttttttgtttgttygtttttatygtygttttygtttttgtyggggayggggatagtagattttyggygttyggttttygygtatttgtygygygtatygttttttyggtttgygyggtttygggggtttygggaagatygagygttggyggttagttyggggaggttgtgggtagtaggggtggttgygggtttttagtttttttttygtttatttyggagtttatatttgggatttttatttygggagaattttgttttttttttaygatgagtttggaggattggagtygggatttggtatttttagggttgtgattgggtgaattttgagggtatagttgttgttygtygttttaggggttttaggatggggygagtagttttgaagaggtttaagggtatttygtgaggagtttttaygttttgagagtggggygtagagtyggagtttygggttatgttttygttgtygttggygygggatattyggtagtygtttggygtttttttgttggtgygaggttttatggtgttttgtaaygtttgtttgattttgttggttatygttaygttyggtttygyggtgttgttgttttttaataattgtaggtggtygygggyggggygtygtattggttaagttttaatttygaggtttttgtatatagaggttggaggtygyggygggttygyggggttttyggtagtttttyggggatgggatgggttattttgyggatttttyggtttttggaggtyg

SEQ ID NO: 11078 - DNA, 5586 bp, synthetic construct
  misc_feature 1..5586: note = Description of Artificial Sequence: Synthetic polynucleotide
  source 1..5586: mol_type = other DNA
gygtyggttgttggggttgttaggtgttaggagaygtttttttygggtttgtttyggygttygtttttatyggygtttgttttgtygtttagttataggtttygggttttttyggtagygyggagttgayggtgggygyggyggtygtttgttttttggygttggagggygtygaygtgagttatattaattatygyggtyggagttygttggatttggtygtygagggtygygtgtttaaggttttttagggttgygtttagygttttyggtgagttygtggayggyggggatggggttyggyggttttygggttttttttaagtygttttttttttttgtagggagyggtaggygggygggggygyggtttygggttttaggtaaaygttygggatttttaatatygtgaygaatttgtaygtgggygtygygtyggggttygaggtygttgagtgtttggtgtgtttygagttggygttgttggtgttgttttygtygtgttagtatygtatygtgtgtgagggtgagtggggggtttyggggtggggaggttyggttagtagggtygtagttaatygygttttttttttygtagagtgygygygtaggatgaagaagtgtattaggtgttaggtggtygttagtaagaaattgygtttaggtgggtgaggttttgygtttttaataygttttttgtttagttggtggttygygggttttygttttttatttttttttttttatattttygtttatggtttttttttaggttatatttygtttttttaaggtttatattyggttttttagtttttagtttttagttttgtttgttttagattatattyggtttatagtttygttttaaggtaatattttttttttttattatattttagtttygttggattttayggttttttttagattatattttttttatagttttattttagattatagtttatttagagtatygtttttttattatatttyggtttagtttatagtttatttgtagttttgattttagttygtatattattttatgtttgatttttayggtttattttttgttygtattygggttttatttttgtttttaaattatttatttygttagttttttttgtaggttataattygttttaggtgatatttygtttttagtttygttttttygtagttttttgtttttygtatttttttattyggttttttagtttatattygttttttatttygtagayggttttgaggtggygagygtygttttygttttyggttygtygygttagttggtggaggagttgtagagtygttatyggtagatggaggaaygtattatttgttttatttgtatygatagttatattygtttygtgttttagtgyggttayggygtatgygttttttgyggtttygygtttagygtttgttttatttgtygttagtttattygygatygtatttagattttygtgtgagtygygtygttygtygygttygagttgttttygygtgttttygttttgtgttttataaaaagaaagattttyggaygttgtttttgttgtttgtttgggggatygggygtttttggggtttttttttygggataygygggygagtttgggggygaggagggggggtttttttttgggttygtttygttygttttaggttttygggtttagattttygttyggattgyggttttygggttaggatattttttaggygygggtayggtygtttttygttttttaggttygggttygayggggyggggatttttgtgtttgttttygggtttttttygttttttygttttgggggyggtygyggggattygygttttgatttaaggggttygatattttttagggttgtggggtttygttttagtagggagttagttggggggygttttaggtagggtttgggggtygggygtaygtaggyggggtgaygagttgggggggyggggggyggtgtyggagtaaatayggyggttaggtttagtttttygygttttttaagaatygttygyggtygtygttagttgtttggygttgatttygttggtygggttgtygttattttgggttygaygtyggygyggaaaayggggagggaygagatagatataggtyggtttggttyggaattttttgtttttttgtttaattttttattttygtttygygggaygtyggtgttyggtttyggttttagtttagagtygttygygtttggaygtyggtygtttygtygaatttttgggttttygagtttttygttttygtttttaattaggatyggtttagatttttaggttyggygtttagtttygtttttygtttttttygttttttttttttttttgttggggtttagtyggggatttaggagttatatattttttattttaygygttattttttayggggtttttygtagttagggttygttttttttyggtttttygggagattttggtaagtttttttttttygtttygtaatttggtatttttygyggtttttgtttatttaygtatttttttttygtttttttttttatygttttatatttattgttaygtttttattyggttatttttttttagttttyggggatattgttaggygagygaygygttttttgyggtttagtttagttgtttgggttaggatggagatttygtttatgtggggtttaggggttttttgaggattttatttgggaaaaaagttattagattatttattgtttagtagtgggggtttggggatttttattgttatttttttttaagygggagttttggygttgtttttttygggttgtttggggtttttttygttttttttttygaggatttygtttagtaggttatgtttaggtttttgtttttggtttaygggaygygggtttttatgttttyggttggagatagtaggtagttyggttaayggaygggttagttggttttttttaggggtagttttgttttttttttygtttygttttttttttttttattatatygggttgtaattygagtygtygagttattgtttttttttyggatttttttyggaggttttgyggttygggttttygygttttgttgttttatgtagttttgagttttatagtaagtttgttatgggtygyggggttygtgttttttyggaggtttygggggtaggygtygagygtygttggtttggagtygygttggtygttttgtgtttttttttygygttggtgttgttggttyggttgggggtttyggyggtgtyggtttggagygtagygtaggtgagyggygggggggaggttaggtgtygggttgggggggtttttaygtttgtgggtttggtttatyggggggttygtaggaygtgtgyggggtgtgyggggtgtttgagggttyggatgtgygtttygaggtyggagggttggaygtttttgtgtttagttgttgggaggggtgggaggtttygttttgttgtttagtttttttttttttattgggtygygtttttagggaygtgtaatagggygtttaggttaggagattygaaattataggtagataggattygttaygttygtttttagttttgggtatttttattttygtttttttttagtttatttttygyggtagtttttggttttggggatygttatygatgttttttaygtaygtttttttttttgaagggagaygtygttgygttgggtttttyggyggttttttttattygggtttygggtttattggtttttygtagaygtygttataygttgattttagttaggttgygttgggattattttaattttatttataggtgygttttggttgggtttygggggagggggygyggtyggygttygttgagtttattttttttgtaggattttttttttttygyggaatttgttgagttygygggagaygyggygggttttagttgtygtttttygtatgtggagygaygtgtttttttttagttttygygaggtggttttygagtagtttagygattttyggataggtgggygttygttttygtttyggttyggttttgygygttyggttttttagtttygtgttttttttaggtttttattygattaattatayggattgtttggttttygygttgtattattgtttygayggttttaygggggagttggtttaygttttttttttttygtayggyggtatttatttygaygatagygagtattgggttttgggttttaygygttatagttggaagaaaggtgatygtttaggttggttttttggaggttttttttttgtagtatagtgggttgtygyggtygggttttggggtagayggtaggagggatttttyggggtggtggttgttattggagtttagtaggtaaggaggggagttygtgggagtttttatttyggtagttttgaatttttttttttatttttttgygtttttggagygggagttggagttgtatttttgggggtygagtttatygtttgggtttagaatatttttattttttygtggttgyggtygagggyggtttygyggttgygttttagtagatatatygggtttyggggagttggtttaygggyggyggggttgggttyggggtttttaggygttgattttyggggttygtaggygtgtggtttayggatttggtgtaygtggyggtttaygagatyggttaygygttgggtttgatgtatttataatayggtygggygtttatgtatttgaaygttaygttgygyggttggaaggygttgttttaggaygagttgtgggggttgtatyggttttayggtgagtttttttgtygggygggagggyggggatygggyggttttgagttaggtygtgttttttaygttttygataggatgtttygataggttgttygtgtgygygttttgggygyggaggggtttttgygaygttygtyggyggtttatgaagaggttttgttttagtagttgygatttttgttayggtgatgtttayggggtygggatagggttgygtgggagttgggttttggttatggtyggggttgagggggtattgayggggtttttttttttattyggagtagaattttttttttttayggtggttattattttatygttttttaggattaaaattaggttggtgttygagggtaggaaygtgatttttygttgyggttagaagattttttataagaaagggaaagtgtagtgagtgagygtttygggyggttttyggggtgggtagttygygggyggttttggggtaggggtgyggggtaggtagyggggggggttgtgtttgtaggagaygtttygtttttttgtagttggtataaggattaggagtttttggagtttttttatttyggttatttggttttgggygaggygtatttgagtattatygttaaygtygttaatgagggtatttatatttgygtggtgygtygttagtagygygtgttgattatttatttttggygagttygtgtgyggggttgagttyg

SEQ ID NO: 11079 - DNA, 1264 bp, synthetic construct
  misc_feature 1..1264: note = Description of Artificial Sequence: Synthetic polynucleotide
  source 1..1264: mol_type = other DNA
gygyggttygggygtagtttyggygtagttttygygtygagyggtttygygtttygtattagtttttgttyggtttygggtgaygtygtatttttygattggattaygyggtttggggggyggggtttggttyggtgagtttatygtygygtttygttattggttygggyggygtattygggtagtggyggggagatygyggtattyggagtttygygagtygttttagttgyggygagtggagttgagygggygyggggtygggttgggtygggtygggyggggtygggyggggygygggagttagtgagyggyggttyggygtaagtttgaygagtaggagtygagtttagtaggttygggtaggtgygyggyggygyggggttaggyggagggygygtgyggtygagggyggyggttggygggggygygygyggggygggggyggggtyggggygtggggataygygtgttygygggtygggggygtggtgygyggttaygygtgtttttggygygagtgtgyggggttaggtygggagggygtgygyggatygggygtgtttaygygyggtagggaggggttaygagggtgygygygtttttggygygagtgggaagtgtggggattyggygggttyggtgtgaggggygtgtttttggggygagagtggggagtgagtgtgaggagtaagggtgaggggttgtagggaggggtgygtttggtygaggagtgggtgggagataygygtgtttatgtygygagggtgtgtygaygttygagtttgygtggggttyggggtygtgtgtttggagtggtygagggygtgaggggygygygtgtttgtgygaggggygtgtgyggygggtgtgagttaygygtgtttgggtgygygygygggtyggatgagtttttggagtggtgygaggaygygygygtgtgtttgtgttggagygagggyggggaygagygtgtygggygygygygggyggggttggggyggygtyggggygygygggggttyggttyggtyggyggygagtgtgttggggygttyggtttttttttaataygggtttttgggatttagtgtygtttttttttygyggyggggttygyggagttttyggtttttttgggtagataggtgygaggygaggtgygggtatagttttgygttttttagygggtgygggatygggygaygggggattgtttttaattatagattaggggagyggagggaygttygatttattygyg

SEQ ID NO: 11080 - DNA, 716 bp, synthetic construct
  misc_feature 1..716: note = Description of Artificial Sequence: Synthetic polynucleotide
  source 1..716: mol_type = other DNA
tygttttygyggggygggaatttygygtttttttttttygagttttattttttatggtaaagyggygtggggyggyggggyggagggagtygagggggyggggagggyggaygggyggaggggaygggaggtttagyggtttygggtttygttggttygggygtyggatyggagtygtyggggygygggyggtttaggtaagygggtygggtgggtgggggtygygttttttygtttttgttttyggtgtatataggtgatagygtyggtagtgttyggtyggagtttgttyggtygttagtygggattttyggygyggygtttttggaggggtttgygggtggggggtgyggtttttaygttttttgygttttagttttttggttttttttttyggagtyggggagtyggtaggttyggggygagggtttagtgaggtyggyggagggtygagttttagttygggagygggagtyggggattyggygygtagggyggaagttttygtataaaaggtyggagtttygtatatggatygaattaaagtttyggyggygtttagyggtgatttyggyggtygttttgttyggttgtttgyggagggtttygygttttyggagttygggggygttttaggtttttttttttagttagggttaggtaaggggagggaygggtttyggggttgtttttttttgggttttaygygttygtyg

SEQ ID NO: 11081 - DNA, 619 bp, synthetic construct
  misc_feature 1..619: note = Description of Artificial Sequence: Synthetic polynucleotide
  source 1..619: mol_type = other DNA
tygttygggattyggggggaggygygttgggtggttyggtagtygggggygggyggtagtttgtaggygtaattggtatgtaygtygttgtagttgagatygtttaataaagtattatatattttatygtttttatattttattattttaygyggagtttgtgagagggttttaatgggagttagttgtgtttttattttttgttgtyggtygggaygggtttttttgyggattttttgaaatgaaataatgtgatgtaygtygygataagggtyggtttgtaatgaggtttaggtygtygggyggttgttattgttttaggtgtygygtatttgggttgygaggataaggaggaggagggggyggygtyggaggatygggggggagggggaagtygygaggggtagggggtgggagaaggyggagggaggaggtagggggtagggggygggyggaagaggggaggaaggagggggyggygggtygyggtaggttaggygggagaagtyggagatagagagaggayggggatagtggyggtttgtagagttttaggaattygggtttaaattttgttygttagygtgagagagygtttgttygtttaggyggtttatyg

SEQ ID NO: 11082 - DNA, 293 bp, synthetic construct
  misc_feature 1..293: note = Description of Artificial Sequence: Synthetic polynucleotide
  source 1..293: mol_type = other DNA
gyggtttyggtaggggttgttgyggygatttaggttgttgyggttttagttttattagttgttgttgttttttaaggagaygtygtygatagyggagtagtggttgttgttgttgygggggyggtagttagaggttttagygttttaataatyggagtttaggatgttgtttyggttgttgagaggttygtaatttttagygttgygttagagaaattygtttagtttagagygggttygtttygttgyggtttttaygyggggttgggtttyggagtttgtttygtaaagyg

SEQ ID NO: 11083 - DNA, 2748 bp, synthetic construct
  misc_feature 1..2748: note = Description of Artificial Sequence: Synthetic polynucleotide
  source 1..2748: mol_type = other DNA
ayggtagggggttttygtgtttttygagaatttaagaattygtttygtttttaygyggaaagttgggagaaaaattgttttttttttatttttttttattttttatttattygtttttggagtttygttygtagatatttttttttttygagttagaaatagatatattattttttttttattttttttttygtgygtatattygtttttttttttttgtttgtttttygtttttttttttttttttttttttgttyggagttgtagtttgtagtttygattygggttggttggttggttgagtgyggtyggggygttgttyggtagtgyggtgtttaygggattgataggtaggtaggtygygggttgggattyggatattaaagtaaaagtatygttgggygtyggaggagtygyggggtttttattttttttttgattgatttttaaattttaatttgtatttttttygtygtttygttttttttttttygatttygttttatygtttttyggtttttttgtttttttttttttttyggttttttttttygygttttttttttttgygttttyggtttgttttttttttttttttttygtttttttttttttttttttttttttttttyggtttttttygttttttttttttttttttttttttttygttttttttttttgygttttygttttttgtttttttttttygtgtttgtagaygygyggatygtttatgygtttttygygggtagaatgttgggtagtagygttaagagygtgtagttygaggtggagttgagtagyggyggyggygaygagggygyggaygaatygyggggygtyggtaggaaggyggtagyggyggayggtagaggtatgttgtttaagygygttaaggygttyggyggyggyggyggtatggttaaggttagygyggttgagttgaaggtttttaagttyggtagygtggatagtygtgttttyggygggtygttygtttttaatttgygtaagtagaagttatttattaatttttttttttttayggatttygagaaaaagttgtagttttatgagttygaatggagygaygatatggttaaggygtttaaaggtttaggtaaggtggggtttaagggtygtgaagtttygttgatgtttaagaygttgtttaagtyggagtattygtttttttaggttaagggtagttyggygggyggygttaagatttttttggtttygttygygtttaatttgggaaagtygagtyggatttttygaggattttatgyggaggttaagtygtttagtaaggygtttgaagyggtygtgagygaagatggtaaatyggaygaygagttgttttttagtaaggttaaggygtaaaagagttttgggtttgttttttttgttaagggttaggaggagygygttttttttaaggtggatttygagttggtggtgatygtgttgggagatttggagtagttgttttttagttagatgttgggtaagttttgtygtttygtttygtttygtttttggtttttttttaattagttgttggggaaggtgtggggaaagygaagttttttttttttgygttttttyggagggtttttttgtttaygattaggttgtgatgggtattgygtttagatgtgttgagttggtttatttttagatgygtatggtttaagtgtatttttttaaagatattataggygggaattygggttygattttggtttgttygaggtgaggttggataatgggatggggggtgagggggttataggtttttagaaatagagttagaattttaatatggtaaaatttgggattggtggaaattttygttgtggtgtggtttgygtttgataggagtatttygtattgtaaggggagygtttagygagagttyggatttagaggatagatgtgggagagtagatgtgagggttgattggtttyggaatatagttgaggttttattttttttgtggatttygagtgggagygtaagtyggattttttygyggtgtgaggattttggttaaaagaagygtttagggtygggggygggygggttgttagttgtgygtatttgggygtatgttygatattttagtttyggttttggttttaatttttatattygtaggttttttagggygtgtygaaagttttgggygttagygtygagatttttgtttgatygggaagtttttgttttgtggttaatggaagtygagtaggygggaagggaggaataaagtttgttygagtggaggaagygygtagagttgttttattgtttttygtgtttgaagagtttatgtaaaaaaattygaagygggtttyggaattgtttttttttttttyggagagtttttgtttttagagaggaatagatttgggatgtgtyggaygttaggyggttatgtttygggaattggtaygggtttttttggggttayggaataaggayggtggggtttggtgtttaggygagttgttttggttgygyggatttgttgyggtggttgggttgtgggtttttyggygtygagggattygagttttttgggtattyggtaggttgttygttygttgggggttgggaaggggygtgttaatgygygtgtgaaagggyggggtygagtgaygggtttggygggtggggaatatgtaagagttygtygggyggttttggagaatgygaagtyggaggagatyggttyg

SEQ ID NO: 11084 - DNA, 433 bp, synthetic construct
  misc_feature 1..433: note = Description of Artificial Sequence: Synthetic polynucleotide
  source 1..433: mol_type = other DNA
tygtttyggygtttttatygtygtygtygtygtttaatagagtttttggggyggtttttatygayggtgtagttygtygggatygggaggaagtagttgyggttatygygtygtgygttygygttyggtygttaggtgttttagtagttygatygtygagatgtttagttygtyggggtttygggygttatggttttgygtygygttgtgygtttttyggagggtyggyggygttttttagttyggttyggggtttatygtttgttyggttttttgttattgttaggaggayggtattatgttgtttgtygattgttttgagttygggttgttygtygtttygggggatttggattttttgayggtttatttgtgagtattgttygtttgttttygtttggttttgygggttgttggttagygtttagtttyg

SEQ ID NO: 11085 - DNA, 1376 bp, synthetic construct
  misc_feature 1..1376: note = Description of Artificial Sequence: Synthetic polynucleotide
  source 1..1376: mol_type = other DNA
tyggtatyggggttgtatttttgggtagaygttgtatgtttgtttttaggygyggttttgttgttatttttttgggggttyggagygygatagtagtttggggaygtttttygygtttagtayggtgtatttgggttttgaggttttggtygaaaygygttaagttgggggtaggtgtagygattttatatttttyggttgygygttttggyggtaggaggyggggtygggggyggggygtgagttggtyggggyggggtttatggaggggygggatygyggygttttataagtattgyggagygaggygygygttyggttagagagygagygygtaayggyggygayggyggygattttatygygtattttgttaggttttyggygtttagygttttaygygttttygygttttygygttttygygttttttttttygygttttygtttttyggttygttaggtttttttgtyggttattygttaggtttygygtyggttygttygtygtttaggatyggttygygtttygtaggtygttygtygttygygtygttatgggagtggagggttgtattaagtgtattaagtatttgtttttygtttttaatttygttttttgggtaagggttgygtygggggtyggggygggagggggtaggtatatattttaygttgggtaggtttygyggtagygtgttaggtttygygggygtagygygggtygygaagttgtggggttatttgtgggttttaggagyggggtggggggtygttyggggttatygygtttttygatattggggttgagggttgygagtygagtttyggggtttttgtgttygggggtttatttttgyggtygggtyggggtttttgggggtygtygggtagttttygttgtggtggtgatgggtgyggtggtygygggtygggattygagtattyggtygttttttagttaaggaggggtttgygygggtttttggtygyggatttyggattgttgtttygyggggaygaggggggggttygygggygggatttttggygtttygtttttatgagtttattaagagtygtygtttttggatggtggggygggggygtatattttgtyggaggttgggggygattygttttattttttttttagtttagtttattttttaatttgyggttattattygagatttttttgggggtygygtttaaaaggagygtagattttygtygggatggtttagaagttggggtgygygtattttggtygtttttgtttgggagtygatttttttttttttatttagataygttttagyggaggtttttttttagaagggttttggaggtttygtaggagtggggatttygyg

SEQ ID NO: 11086 - DNA, 3393 bp, synthetic construct
  misc_feature 1..3393: note = Description of Artificial Sequence: Synthetic polynucleotide
  source 1..3393: mol_type = other DNA
gygggtgtatagggagygttaggattttagygttttgtyggattagatttataygttygaggtgatgtttattattaggtatatgaagtatttgagtatgaagayggygtagtygggtttgygtgtttggtygggttgtaggtttygtaggtaygggtagttgtgygtggttttttagygygggyggttgtgttgttygtagaagaggtaggygattattatygyggygggtayggtgtagagtayggtgaataggtttaggyggattattagtttttttagtttgtgygttttggtggggtygttttgttgtttgatgatygagyggatgyggaagagggataygaagtyggttagtaggaatatggtgtygatgaagaggtagatgattagyggygttagtaygaagtygygtaggttgtttaggttttggttgtttaygtagtagatgttygttatygggtygtygtttatygagttgagygttagtatygygatggatttgaygttgggtataagttaygyggttaggtggaagtattgygagtagtyggygatggtttygttgttttattttatatyggtygttaggaattatgtgagygataagattatttattagatggagttggttatgtygaagaagtagattagtaagaagattayggtgtatagygyggggtyggtggtttygtagygtaygtgttgttttatygygtttagtttttygtattygtygygttygttygggtygttygygttygygttygtygygttygygttygtygtygygtygttygygtttttagygtttttygygttyggygygttatygttgtaygttattttttygtggttygttattaggygtattaggtagtttatygataygaagaggtagtaggtygagaggaagataatgggtygtttygggtatttgaagygttttatgtygataaggaaggtggagayggtggygaaggtggataygaagtagagtatygattataggtygatttagaagayggtgaaggygygttygttttggttgaaaaaggggttgtggtagggtagygygtagttagygatttggtttgttttgaygyggttgtagagygggtggygttygttggataygtttattataggygygyggtattggtattygggttygtagggagtygygtygtygttagggggtygygttttttygttatygtygtygtygygagttgggggygtygtygygttttygtygttatygtttttgtygtygtygtggtgygggggtttggttttyggygggyggtygtggtygttgttygaaggyggttgttygtygggyggyggyggyggtaggyggygyggygggttgggygyggyggtggttaggtyggtgyggttgtagtttatgtatagygtgttagggttgttttgttygggtagtyggtygtagygtatgyggtygggttaggygaagtygtattggygtatgagyggygygtagtyggttttggygygttygtatatygagyggtagggyggtagyggttttttgtagttttttaggtagatgggygtgtatatgttgtataggaagaatttgagatygggygagtattggatttttattagyggttagaattggtgtatttttaggttygtttygttttgygtgtygtggttgaattgattgggtatgtaggtgtagttgtagtygatgtttttatatagyggtayggtgattttttggtatgttagttttttggtygaggyggtygtagygtygttagagygttgtagtagygttaaggyggttagtagygaggttatttttaataggtaattttattttatgttgtgygtttyggttyggtgttttygttttttaggyggygygtagaggggtgtyggggggggggtttaygagagagtygtagaygggtatagygggtgatttggggttttttttatgtttygttygggaggggggtttgtygataatttaattttttttaggggygygttygtagyggygyggttygtagtttgggtagggttttttygtattttttttygtygtttygggggtttgaaggyggttgtaggygygygttatagttygtaggttygttttgttggtttygggtygygtttagttttygyggygtagagyggtygggtttyggtttatygtttygygttygttygtttttttttygygygttygattattttttttygtygygtygggyggyggtgatttygtyggatagagagggyggaggygtygtaagttttttttggggtygyggtgygtagttaagatggttgggtygggtygtttgtygygtygggttagttttggyggttattattyggttttygggggtttatgttygtttttaaggttaagtygtygtygtygtygtyggagttggggattygtttyggtttaggtygtygtttttttttttyggygttygtttttygttygttygtygtygggatagayggattttygtygtttggaaaagttagygtygygtttyggtygtagtygggygaggtgtatatagttttttttttgttggatatttaggagtaaatttagatyggaaggyggagyggatatttgagtggygyggttygygtttagtygtygtttttttttyggygggagtagygtttttagtttaatttttyggttttagtttygttygygtygygttgtyggtttatgaatatttatatagygyggattyggttttygtttttagtttygygagttaatygtygggyggtagggyggagtttaygygtttttagggtttagttttttttaaggtagttttygagtgttygtattgttgtgygygttttttgyggatggagagttttggtaattttgggattgatygtagagatagagtgttggttatggttgtttttatggygttgagtgygtyggaggttttggtttttttatttygagtttgtttttggggatagggayggggtttggtgtagygygygttttttyggygygttttaaattagttaagtttttgttgttatttttygtaaatgtgggtgatttgtaggyggttggggtttygtgtttttyggggyggtaggaaggtttygtagtaggygagygtyggggaggtttgtyggggttyggygttgtagaagattygggaaagggtgttttttttggggtttttagaaygatggtttttgagatttggagatgtggggggtgtggagttattttaaattggggttggattygggayggttygggtgagatgtttyggagtttagttttgggygygygaggggygygggggataaatgttygttagagatttttttttygttttygttgyg

SEQ ID NO: 11087 - DNA, 1381 bp, synthetic construct
  misc_feature 1..1381: note = Description of Artificial Sequence: Synthetic polynucleotide
  source 1..1381: mol_type = other DNA
tygyggtagygttagttgtatttttttttaaaaatyggaggaaggagtttgggggttaggtyggggyggtttgtaggtgtgaatatttyggaagtttttggygttttggtttttaagagtatatttgyggttgtttaygggttttaygttttgygatagttatttygtggtttygggggttttaagggyggtttttygtatyggggttttaggtagyggaatttttttttagggtttatttataaagygtggtgtygtagagttttttayggaggggttttagtttggagttygggtatygtttatttttaattygtygttagtttyggattttttygygtttgtttygtattayggagtygggtttttagagtagtaaggttattaggtggyggtgttggygtagtaggyggagygtygggtgygyggggtygygtttttggttttygaaggtgatgaagatgggtttgygggtgagttttagtagtyggtataggttttttttgyggggygggatygttaggggggtgggtgttaygttggggtttatttaatttygygygggatttatyggaagttgtggttgtattaggttyggtttaggaaggygttygaaagtattaygatgaggygtyggtagyggtttaggtttattaagaggtyggyggagggttttgygggagggygggygtyggyggygtaggggygggggygggggagggyggggtyggaggtttaggggyggtgtyggaygtagagttttaagggaggggyggggtttgyggggtgggygggtttttgaggyggggtttygggtgggyggggatgggggyggagttygatggtgggggtggggtttygggtgggayggagtatggggyggggyggggygggtttttygggtgggyggggtayggggtggggttygggatattagygygyggtaggaggtygyggtygtttaggaagagtttgtagtttygaygtygttttagttgyggttttaggatgaagtttaygaatttgyggttttyggggtagtygttgtaggagaygtaggygtygtagagtttttygtttgyggayggyggttagttatttygatggttttygaggttttatattagttttyggggtttttaatatttttaattattttttaygtgtataggggtagattygtttyggattttaattttagtygggtygtatagagtattygggggttaattttttttygtygtaygtttttaaagtygagtttagtagygtatttttagggaggtygtggygattttttttygygtttaygygggttttaygtatygtttatttttatttttttataygygttttggtattagagtagtaygttgagayg

SEQ ID NO: 11088 - DNA, 493 bp, synthetic construct
  misc_feature 1..493: note = Description of Artificial Sequence: Synthetic polynucleotide
  source 1..493: mol_type = other DNA
tyggattygggggaaatggggtattaayggttgggttttaggagatattyggaggggttygygggttyggttyggttttttygttggggggttattagtyggtyggtagygagatatttagaggttygtttttttatygygttgttatagtaayggtttggtyggttgygtttygggtygttygttttatttygygggttygttttgagttagtgattttagggattatttatygyggtyggyggattggygggttttygataggtgygtatattyggygtaggttgtygttgagttyggaattttgtatygggagaaattttttagttygtagagtaatygtagggtagtggaygggggtygygygaggataaatagyggyggygggtgtaaagttttttttttaagtygyggggttggtygggaggtgtyggttgtataayggygtttaygtgatttaggtgtagttttaggygygtttaagggtagttyg

SEQ ID NO: 11089 - DNA, 922 bp, synthetic construct
  misc_feature 1..922: note = Description of Artificial Sequence: Synthetic polynucleotide
  source 1..922: mol_type = other DNA
tygygggygttttgtagggatggagattgagagaggttagggattyggtttttttgggaaaaygygygggygttttagtttttygttttgyggtattttatttgttttygaggattatygttaagaagaggtttygtygtgttattgatattttatttygttttttttygygaggtgttttygagttttygaggaygyggaaygtyggggtttttygtygggtaagtattagtatttagatttygtaygtagttttgtatttttaygttttttagggaaygtyggttygttygttttygggatttttygttttttaagttaaggttttttaagtttagtgttygygygttattttttttttygattttgyggygggatttttattttygtattttttygyggggttggttaagtttttagattttttgygttgtagtyggttyggaaagttatttttaggttattttttygygygygygyggyggyggttayggtggyggyggttgygattygaaygggtttttttatgtatygygtagggtagaggagggagyggygtttygtaygtyggggttggggygttgggtagggygggygggygtggggtttygggttttttygtatttagtygygygagtygggttttygggtttaggggaggggagttgaggggyggagttatyggggygygttttygyggttgygttttttttygtyggggagygygggtaygtaattyggagggtgttgggtyggttyggagtaygygagtagygggaggagggatyggggaatgattgayggaggygggtygtagaggtygttgtgtttygtyggttygtattyggtyggagtgtgygygygtagtttgttagattagyggygggggtaygggtygtattaagtgayggaggggggtayg

SEQ ID NO: 11090 - DNA, 719 bp, synthetic construct
  misc_feature 1..719: note = Description of Artificial Sequence: Synthetic polynucleotide
  source 1..719: mol_type = other DNA
tygtttttttggtatttayggygtttttgtttgtttttgttygggtttyggaggygygaatattattttaagtttgygatygygyggtattattttygttttttttttttttttatttygttttttttatttttttygggagtttttgggagtygggtygtygtgtgygtaagygtgtttagtttttttttygtttttaattygggttygggttttygttttttttgtaggyggattygttygtttttaggtyggattygygttygggatagggattyggtygagtygagtygtygygttagygttgygtygtyggtyggtgygtttagyggatyggagttgygygyggaatygtgttgtttygtttygttttattygtgagggtgagtaygyggyggyggtgygygggggtttgyggggyggggyggggyggggagtygyggggttttyggtygtttgattttagtyggygtygygtttttyggagggggtygggttttgtaygtgggygtagygygggtyggggtggggttgttatagttttgyggagttgtttttyggggtttttttttttggattagattttygygggaagtyggatttttttygtttttttggagtgagtaagygggatagttttgyggaaagttttygtttttaattttttagttttgygttyggattgaagyggyggtttttatttttagtattttygagyg

SEQ ID NO: 11091 - DNA, 958 bp, synthetic construct
  misc_feature 1..958: note = Description of Artificial Sequence: Synthetic polynucleotide
  source 1..958: mol_type = other DNA
tygygttgttagtatttygtatagttygttygaaatattagggaaggggttygtaggtgtgggggtggggtggygaggttaggtagtttggygygagggagagagtygaggtttgggttaggaaggtttttgggtgtygtgtgggygtagagtttaggagagygtattgttaggttyggattttttygtttttatttygggaagaggttygttygtygtagggggaaggygggattatagtatttyggaggagyggtyggttygggtatgygggyggyggggyggggagggaggttttyggaatttygagagagtattygtgtttygygggtttygtgtttygttttygggtttttttttttttaaygtaggggatttagttyggggtagtgtygggtattggygttggygtttygtttagttttgygattttttttygtttygttttttttygtttygtttygttttttttygtttygttttygggtygtttygtttygtaggttygttattttygggtaggtttygttttttgttttygttggyggyggyggyggyggyggtgtyggagygygagtagagyggagatttttaggttttgygggygyggtgagtgyggttygggyggygggyggygaggygggtttygagagygtgyggagtygygyggttttgagtyggygtygggygggttgggtatttttaggtygagattygagaagggggagyggtygggggygtttaygggaggtagtgtgggtagggyggyggtgggaygagaggaygaggaatagagtaggygtygtgygggaagygggtygggaaggggagggtgggtgyggggttygggtatygagygaagtggggttttttaggggatggtttygaggaagatygttttagaaagggagtaattyggggtyggtaagggttttygattgtgtgatttygtgtatyg

SEQ ID NO: 11092 - DNA, 3843 bp, synthetic construct
  misc_feature 1..3843: note = Description of Artificial Sequence: Synthetic polynucleotide
  source 1..3843: mol_type = other DNA
tygtaattttgaygagaagggttttttygttgaaagtttaattgtagagygttyggagygygttgtgagttygtaggaaygyggtygggtyggggaygggagaaaggygyggtygggattttgtattgtgtygygyggygtttgyggttggaatttggtttggaaygyggttttttyggttttagtttttygtttaggtttygtttattyggtygtttygttggttygtatygttgtttyggttatygaggagtttaaagttggyggygtttygyggatttyggyggagagygygagggagtygyggtygatttttgtattaygaagataattggaggtyggygggggaggygggttaygaggggttggggygagggagttgggatgygygggttyggttygtygggaaataggttgtygyggagtttygttttttttttttttgyggttttygtygygatttgattttygttttgttyggggagttaatttagtygttttyggggygttttttttttttttggatttttayggttggattagagtttttttggtagtygggttaaaggtttttttagtaaggttaaggygyggtyggttggtatttggggatttttttttagtygagtattggttttttaatygtattgttaaggattatggtagyggtaggaaattygaagggttttataggtttgygggagggaggatttattttatagtaaggaatagatttagatagatyggggattttagtgggaggggaygagaggttttaggaygttggaatgtggtaaaaataaaatattttttatttatgtatattattattttttgattgygggttggggggaagggagtttagggttaatgtgttttagattttagygttttttayggttgtgttagggttggggtggtttatttttttatagaygaaaattaagatttaaaagtatatttttattgtggtttttttattaaagtttattaaygtgatatataggttgyggygttggagggaagyggygaaayggggagaataaaygtaatagaagtaaattgttgtttgtagaggygagaggygaaggaayggaagttatattygattttagttttatttygtttttattagygtygggttagygtaggaaattaggaataggtgtaggtaagggtggtagttyggtagagttagygttttattttttttaatttttygttagygtgggtttggatggttgggttgtttgggtatttttaagggggattaggtatygygggtaggtttttaaataygtgaagggtatagggtttgaaagataaggaggggygtttaggaagggyggaaaagaggggttttggggttttttaggatattaagttagtttttgaaaayggygttttttggaaggttttttaatattttygagggaagatttggagttttgaagatttaatgaaattttagttttgattgattttttttttgygattaatttyggatgtttttatttagtttttgtttyggtaatyggttttttggggatagtagtattagtattygaygtttatygtataagtgggygtygtggtgygaggygtattttagttatttaggtyggggtgggggygtttyggtatttatattttttaagtaggtaaatttttaggtttgtttttygagaatygggagttygtattatagtttygggtaattatygaggtagtttatgtaattgttygygatgtygtttagtagatttttttttttattyggttttagagtttagtatatgggtatttttttttttttattttttatttyggygattggaatttygagtttgttttattatygttttttataaagtagyggggtgatttygtgtgttataaatattaagttagtatgtaggtttaggtaaaattttggttgtttttttgygttttttttattgygtygatggtttatagataattgtatttttataaattttttttttayggttagggggtgggagggagttagagatygggtgggggtttggygyggtattgttgagggttttgtatttaattgagtagtaatatatttatttatatggaygygggtgtataaatygttttaatattttgttttgaaagyggagttaatttttaaagttaaggattaygtagttgaatttttagtattttttaatttygtttaggygggggtaggtagagaaggggygggtagygggtagttaattygttygattttttygttaagaaggatttattaggtgaatttttygttttttatttaagtagttggttgtgtatttttyggttgygtgtgtgtgtttatatatatatatatatatatatatatatgtygttttattattttttagtttgtttttttaatgtaaygatygtatttaaaaatggtaattaaaatgattgaggagttyggtgattatattttaatttagagtatatttttygaagttgggggtgagagtagttatatagttatatttatattygggagttttttaagygtttatttggyggttgtagttttagttggtttttagaygaatattaatatygyggtygggygttyggtgaggagaggygggygtttygygggttgtagagggygaggagttggggtygtatttttaggatttgagttttaattatygttygtgyggggttgttgtagtyggtatttgtttygtagggtaggttgtagtygttgaagttyggygtygtttygygggtttttttagygttygaygggggtttggggygagttagtttgtagaggggttgtaggygatygggtyggggyggggaaygggattygggagaggtagaygaatttggggygygtygttttttttttattygttttttatttttttgtttttttttaatttttgtttttaggttttagttygyggygggtttygggggttgyggyggttttaggttttagaatagtttgttttttyggttattygygttttagtttttttttttttgggttaggggagtaagtaaatatttttyggagttttyggtagtygygtgagttattygaattttgttygggttagtagtgtagagggygatggagttggygaggygtygtygyggtttttaaggygttttttygtagagyggattaygtygttttatygtggttgtaggttgttatygtyggggaagyggygaggayggyggtagggaggtaaggygtygygtyggtggtttttttttttttyggyggygyggtttttttgtttygygagtygtagyggggygtttaggaaggagtaggttygggttttgygtttagttttagygagattaataatagttttygyggggagyggagttttagygagtttttagtygygygygtaygatyggttttygttttyggtygttttyggtyggygtttttgttagtattgttgttttatatgaaatagttgtaatttygaggtttttggggggttggggygggtgtgtgygygygygtgtgtgagtgtgtgtgtgtgtgtgtgtgtttaatagtttttttttttttttttttttttttgtttgttygtttgtttgttttygttttttattttygtttttttatatatagaaagagagggygagygagagagagatatatatatataygtataygtataygtaggttatatgaatgggaggyggtagttaattttaygaggtyggygagtygygyggygtattggygttgggagtagggtygtatttyggygygggggggygttaygtaggtgatgggygttttttygggggttaygygyg

SEQ ID NO: 11093 - DNA, 384 bp, synthetic construct
  misc_feature 1..384: note = Description of Artificial Sequence: Synthetic polynucleotide
  source 1..384: mol_type = other DNA
tyggaagtyggggggygggtttttatagttattgttygttattagttygttattgtgtttatatagggtgatttgatttygaggyggtggaggagggaataattttagagagtatattttgtyggttygtaggaygtttgtagtyggtaaatttttggtyggaayggtatagatygtattttygtaattyggttttygggttagattygtatgyggaygggtatygtaagggataaayggygaggyggaatttaayggaagtgaagaaaagattaaygggaaagaaggaygagtaygyggtttygggatagatttttaaagtttttttttgygttttttggyggtyggagggggagtagygyggataygtttttyggttaatyg

SEQ ID NO: 11094 - DNA, 1432 bp, synthetic construct
  misc_feature 1..1432: note = Description of Artificial Sequence: Synthetic polynucleotide
  source 1..1432: mol_type = other DNA
aygttttgygtttttagtyggggtttttttattyggygtyggygygtagtatgtygggagttgtagttttygygaggtaagtttygtttygtttttgtttgggggaggaggttggagagtygttttgtyggtttttgaattttgtygygaaaagygygygtggyggttttyggtttygtttttygtaggaygyggtgtygygttattttggtaatygttttttagtygtygttgattgggttgggtygyggggggygggygggggaygagaygygggggttgttgtyggygttygygtttgttagtygggttagagyggagtagygggtaggattgtttggtyggttgtttygyggagaggttgygygygtyggtygggggaggyggatagtygggttyggygtttgtggggygyggygygyggtattygggtttgagattaggygaggygtyggygygygttagayggygygaggttgyggtttygggagttttygygygtygttyggggttatgggygygtgagagtttagygygygyggtttttgttgyggtttgygagttygtatattyggtgtatagtttttygggtygttttygtgttygttttgygttattgggatyggttgttttttagygtygaggttttygaggttgtattygagtttgygtygttygttgtygtygtygtygtygttgtygtygtygttgttygtyggttttttttttttttatattyggggtttagagtaggaggaggaggggtyggtgtattttygtygttgttttttgtaatttgtaggggtyggtgtatgttyggygaggagtyggggtygttgygggtgygtgtaattttygaaggagataatttttttatttyggggygaattygggggttgtaagtygygggygggygggygagygagaggaagtaataaagataggttgtagttggggttggygaaaggggtygyggtygtygggtttttagygygggyggagagggygttttgggagyggygygggtygagttgtagttttgagyggggtttygaggggaggygtagygtygttygtyggaygtggygattaygggtttyggygaagatgygtygtttgagygttygygyggttttygttyggggygggygtgatttttgttgaayggagattttttttttttttygatttyggayggygtaggtyggygttaggatagtttttatygatagygtttttttttattyggagagaggtatygatttttaaggagggtttygttaggtagtttttgttatttttgtatggttgygattygtygagyggagygtygtggtagttgagatttggtgtttttygayggtttggttgattyggtgagttgtgyggggyggggttttgygttggagttgggggtattttttggygttyg

SEQ ID NO: 11095 - DNA, 325 bp, synthetic construct
  misc_feature 1..325: note = Description of Artificial Sequence: Synthetic polynucleotide
  source 1..325: mol_type = other DNA
aygttagygaaggtygtttyggygtattttagataatgagygtagtgtgtaggagygaggggttggtagaggttaggaagtttttggggttaggygyggttttttatttttaygttagataaagagygyggggtttggggagttggyggttttttygttatttggggygtttggggggttttggggygggggaggygggggttttgtttaatttygttattgttattatyggttaggtygyggtttggtaattygtgaataggaggtagggttgtagggygtgagggatgatgataaggaagtyggaggagtagyggyggtagyg

SEQ ID NO: 11096 - DNA, 1242 bp, synthetic construct
  misc_feature 1..1242: note = Description of Artificial Sequence: Synthetic polynucleotide
  source 1..1242: mol_type = other DNA
tyggttttggtttygtttygtaygygttggtgttatagttgtggtgtagaygttttttygttgygagggtgyggtygtttyggggygagtgtttttyggtttgtaggaggygaattygggttttttygggaggygttygtgggaaygygtatttgygagtttttgtyggttgaggagtygaggtttgygatttttgtygatttgagtttaggygtagtagygtagatttggtygtygtattttttttggttgggatgygggtttaygygggaaaggttgaaaggtggggaatatttyggyggaaaggaattttttttttttgttttgaaggaaagttttttaatatagttatgtttttggtggttttyggttttttatttttaagtttttagttagttttatatttattygttttagtagtygyggagtgggggtttttaaagaatttagttgtagagtaagttyggttgaygtagtgtgygttgggggyggggttttggaygggggyggagttayggygagagtygyggtgagggyggggttygggtgggyggtgttttgagyggggtttttagtgggyggggttttggggtggyggtygttgtygggttaygggagagygyggagttttgygttgggaggtgtayggtgtgtaygttggattggatttttatgtaatttygygttttgygttttaattaggattgtttygygygtttttgagtttygggtttyggttyggatttgtagttttttaggtggttgggaaggtaggtgygtygttgttttyggygygyggygtttygygaggtttttagttttygttttggtggattttygttgggtgggagtygggagtggaggyggtygttttagggagggaggagygtaggygggggttgtttaygggyggagtattgygyggygaagggaattttygaaggggttgatygggtttyggggtygtgataggyggygaggyggtgggaggggagygtgtgaatttaygtygggttttygygggygaygygagygaygygatttggatttttattygggatattgtaaatagatttgtttgtgaggtttaygattgggagtttgttattttgtttaagttygattyggtttyggygttygttygygttttgyggaggttttttgagttagygygyggttgtaggggtttyggggtygtatttyggattagygttagyggygggagagygttgtttgtgagyg

SEQ ID NO: 11097 - DNA, 1460 bp, synthetic construct
  misc_feature 1..1460: note = Description of Artificial Sequence: Synthetic polynucleotide
  source 1..1460: mol_type = other DNA
tyggggtagtygagttatttttttaaagtygattttygggagagatttttagttggaygtttttygttttttaggagygatggttgtaattatttygttygtttttayggggygtttttttaatttttyggttggttttttttttygtagggtttttttyggtttatygttttttttttgyggttttttyggttttttaggtyggatygaggttagygtttgatttttttggtttttagtttgtttttttagtgtttaagagygagaatatygttttygtttatatgtaaaggtygggygtagtaaatgaagtgggaaaagagaaaaatagataaatygttgtggtataaaagatttttttttygttygttttgttttgtagttygggtttagtaggagagggttggggagaattggataaaygttttggaatttataaaggtyggtggtgtygggggtygtaaagggagtgaagaattgaagtagtgagttggataaattyggggtaaagtattaaataatatggatattttggtaaygygtgygygtgtgggtgggyggataaaaggatttattattygtatgattgttttaattttttattttttttgtgtaygtgtgtggaygttgttttaggttygagttygtttttygtttaggaygtatagtttygggtygtggttttygygygttyggttgtgygtttygggtttttggttygygyggtagttatagtttggyggggtttgygyggaggaggtyggttaggygtaggttgtygattttttttatttygtttagagtagtgygtagtttttgygyggaygggtagagtagtyggygygttagttygygyggtatygtygttyggtygttgaagygygyggygagtaygaaggggaaatygaagygygygyggtattgygygttgagttyggttagtygtagtygttygttygygtttaggttttttaggtttgygtygttttgttttygttgygattyggtygtgagygtgtttygttgtagttygttgttygttaggttygggtggtagygtaggatgtttttttggtttgyggagaagtatagatatyggygggagygygttaatygygttygtttygtatygygtattygagggggygygtaggtygygttyggtttttttgtttygtttygtttygttyggttttaaagaaggttgygggagggtgaagtagagtatttaggyggtgatgttttggyggaataggggygtttttggygygtttttttaataagttttggattttgygtttttyggtttttattatattyggtygggattaggatttaggggyggggygggaagtgataygtttgttttttgagattttgggttaagaagagyggaggagagagagggyggtygttgaggttyggaatttaygattaggtygggagggagtagagaygyg

SEQ ID NO: 11098 - DNA, 1064 bp, synthetic construct
  misc_feature 1..1064: note = Description of Artificial Sequence: Synthetic polynucleotide
  source 1..1064: mol_type = other DNA
tygygygattgaggygttagyggyggagttggayggtttgggaaggtttyggtttttyggttgyggttttagttyggayggygtygygtaattttgttatttttttggtttagtttyggttataggaggatttygygggtaaygygyggagtttttggtatttttyggyggtgttttttgttgtttgttyggggatygatttygtatgtttttaggttgatttgtttaagttygaatatygggattatgtatttagtygggattttygggttattttygygtyggataggtaattttattagtttttaattaggatygttatygtygtttyggttgttgttgttgttgttgttttttttgttattggtaagtygygtttyggtatagttygttgttttyggtagggygttgttgttttttggtttygygggggttgtaggggtttttgttgaggaggttatagtgttggygaatygyggatttygggtgtttttyggtygtgaagtttggttggattttttgtatgatttggtgttgtaggtgtagttyggggatygttgygyggtttyggtattagataaygaygtattggtttagygatygggtygtttgagttttaagygtttttygtgygattttggttttggygaggtgygttatttttatttgggygygygtagttygtttygggatygygttyggttgtagttgygttatgaygygttyggaggggtagtagtgttattattggtattggaggtggaggtggtttttatttagttggaggttgtgattyggaatttgtttttggtygtggaagagttgttggggattagtaatgttttggaygygyggagtttggagttygttttttagttygagatagaggagtgtygygtgggtattttgttyggtttgggygygttgtttygttatggagaatttttttattattygtaggtttttggaggagttagagagggaggygtttyggagatttttttgatggattgtaaagttttttaggaattaggygtgygttatygttatatagtygttagtyg

SEQ ID NO: 11099 - DNA, 622 bp, synthetic construct
  misc_feature 1..622: note = Description of Artificial Sequence: Synthetic polynucleotide
  source 1..622: mol_type = other DNA
tygttagttagayggtgtttttgtygtttttgtygttattygttgggtttygtttygttttaagygtattttyggttygtagggtgggaataygaggattatagtgttttaygggygggygggttaggatygtaatttyggyggagtyggygtttttgggtatttttggttttygygtttyggtygtayggtgattattygggaggggatttygggygtttygtaatttttyggttttygtgggttttygggtygtttygtttttygtygtygygtatttttygygtttttyggttttyggtgtyggttttygtttygygtagtttygagtttttagttyggtyggttttttattygtygagygtatttatggyggyggtttttagggtttttgygatttgtyggygggaygtgtttttggtaggtgttattttttygatttgaygtttaggttyggtttygttgttttaggtatagttttagttttgygaggyggggtygtyggttttattyggggggyggtgttgyggggagtagaggttygtgttttygagtygtygygygtggatattagtttyggtttaggtgygggtgggtttygaygggagygygtggtaggtyg

SEQ ID NO: 11100 - DNA, 1622 bp, synthetic construct
  misc_feature 1..1622: note = Description of Artificial Sequence: Synthetic polynucleotide
  source 1..1622: mol_type = other DNA
gygtttttaaaatygagtttatygttttttttttttgygtagtttttatttttttttgtgtttygtattttaataaaygttttygttaagtgattttagtttgaaatatgyggtttttyggatttttttttgtgttatygattttttgygtttagtttttyggagttgtyggtttaatttygtaagttttttyggaattygtgttttttttttgggtagygttattattaygagygtttatttgagaggaygtttgtttttatttagtttttattttgtagtygagtaattttygtaaaaygaatatttggtttagtttttgttggaaatygttgaatagtttttattgttttttggaagggtttgggtagttyggygtggygtttayggttttattaggtttttgttttttgtaggtttygttatttygttattaaagygttygtygygttygtatttgttgtgaggttgtgttygggtygttttygtygagggaayggtttttttaaggttttgygttttaattttygttygtttgttaagaggtagtygtgtyggggagttagagtttttyggggatttttttttgtttttygtggttttttgtggaattttygttttaggatttgtaygtygtttttagtygygygygyggtayggagatygttygttgtgtttygygttgygtttttttygtttttttttygygtaggtttttttgtgttagtyggttgtygatttaggttaggaagttygaggtyggggygttattttaagggttttttygtttttttttygagggtagagaggygttygygttyggaygtattgygggaatatttggagygtyggyggagttyggttgttttygygggagggagttygaygygtatttttgggattyggattyggygttygygtttygggayggatttttgtttyggttgtaggygtagygygtagatttgagtttgtttygyggaatyggggttygagtttyggttygagygyggygtyggggttagyggagaggggyggaagtygtaagggattttyggygtttyggtttggtygygatgaagttttygtttttttttaggtgayggatygtygttgtygtttygggttgtttattatttyggygygtgttygggagtttttatttttttygggttttgtggtyggttaygygttttaggtaygygtygygtygggtygygttattaagttygttgtttttagtttttttyggtagattttttggttatttttattttgyggaggggtygtttattagatgttagaaaattagggtggggtaygtaggttaggggttttagyggttgggtatygtgtttttttygaatttggtgttggaagtgygttygttttygttttttttaggtatttatyggtattgtttagttttgtttggagggtttaggattgaaygtttgttttyggtttttattttggttgtagaggattggtygggtgatgtygygttgttttggttttgggttygtttggaagattygtttgtgtygygggttttttttttggttttggtttttaaagygttttyggtatagtttttyggtttttgtagttyggtggggtyg

SEQ ID NO: 11101 - DNA, 324 bp, synthetic construct
  misc_feature 1..324: note = Description of Artificial Sequence: Synthetic polynucleotide
  source 1..324: mol_type = other DNA
aygtgggttyggagtagggggyggygttygygtttgattyggtttgtyggttgtttgtygttygygtaggagttggtygggygtygtttgtaggttgtttygggtygagtyggagygaygttgtygygtatttgggtagttttygggggtygygttgtgttayggtyggggtygttgygattgyggygtttgtatttgttaygtgattgagtygggtatgtttttygggtttttgtgtgagtgttatgagtgggtgtgygagatttaygaygggagtatttgtgtaggtaagagggyggygttgttttttttttygggaggtyg

SEQ ID NO: 11102 - DNA, 1881 bp, synthetic construct
  misc_feature 1..1881: note = Description of Artificial Sequence: Synthetic polynucleotide
  source 1..1881: mol_type = other DNA
tyggggttttttagtttygtyggggygtttgtttttyggttgagttygttygtagygyggttttyggttattggygaggttgtgyggaattagaaggtygatygygttygggtatttttygygygtttttgattttagttyggtttttyggaagtygtttgggygatttygyggtttaatattyggttttgygaaatygttygygttttyggttyggtttggagggtttygtattattygygygygygygygttygtataggattyggttaataggygtygggatttttggagttygttttgttagaaatttgttaygygygtygtygtatatgygttttaggttttttyggaygtaggygttatygatttygttttygtttygygtttttyggttgtttygtygygatttygggtygygagygttgtygtataggygttttaggtttttyggggtataggygtygtygatttygttttygtttygygatttyggtaygttttaygtttttygtattttagattygtttttttygatttttattggatagtyggggaaaatggygttttaaagygttygtatttattttgtygaaatgygyggtttagtgtaygggygtttagttatagaaggagtttttagaggttaggtgggygtggggtgtttgttgtagtagygagtagagygtggttaggttttygtygyggtaggygyggtgtagygggaaayggagygagagtagtttttygttggagaagttygtttttaygttygygttygttttygtygtygatatggttygttatyggagagygyggggttygttggtttagaggaygygtyggggaggattygagaagtygtygtygtagtataaaggaaygagattagygtygyggtygygttttataggttgtygagyggagygygtatagagggggyggggyggggtttggagyggtygggttgggggyggggtttggtttagaggaygttttgtgtagtygggtaggggtyggggtttggagtygyggatttttggagtygtygggtagggggyggggtttgagtyggaggtygtttggagtagtygggyggagggyggggtttggagttgyggaygtttggagyggtyggtaggtggyggggtttagtttagaggatgtttggagtagtygggtagggagyggagtttggattagaggaygttagtagtagtygattaggaggyggggtatggggttgtygaygtttggagtagtygggtattgggtttgggttagaggaygtttggggyggtgggygtttggagtagttaggtagagggyggggtttggtttgggtttaygtttggggyggtygggggyggggtttggttggaattgaygygtggagtttyggtggagggggyggggtttggttgggtygttgtttatagyggttttyggggtttggaggttayggggttyggaggttayggggttyggaggttayggggttggttgtgtggggggtttaggggygtagagtggttaagtagyggtttgagygggtttyggggttttyggygyggtgggtttyggttgygtttygggtgyggattatgatgtttttagtttgggagtyggttygggyggggaatttyggttgtygggggygygggttgaggttttgygggttygygtttagagygggtgggagttaygggtttttyggaggtttagtagygygyggtgaagttgtttagtaaaaatttatggagygtttayggggagtagggattttygttaaaatttgggaattagtaagttttagttttttatagagtaggatagatttttyggttttgttygagggaygtttttttyggaatygagtgyg

SEQ ID NO: 11103 - DNA, 944 bp, synthetic construct
  misc_feature 1..944: note = Description of Artificial Sequence: Synthetic polynucleotide
  source 1..944: mol_type = other DNA
tygygtggggtttagggaggygygggttgygggggattgygtaaggtyggggtttttggaggtygaggtygyggtgtttttygygaggttattatgagttgagtgtttttggtaggygtttagggatttttygttttttttttttygyggtttyggygggygtyggttagatygtttygttttttygttagttyggaaygttttgtattttttttttyggttgttyggygttygttagyggttagaaattttygtttygttttatgtaatyggggatttygygttttygttgtygtttygttttyggtttagaggaygggtttggggggagggggygtgtggygaygttgttatttattagggtttagtygtygttttttygagttgggtyggtgtttygygyggttttgtagttttgtagygttyggggyggtgtaggagtttyggggtgtygyggygttygttyggttgtatygttggtttttyggttygggttttaggttyggygttttttatttttaggtygygygygtttygttttttygaygatttttagtttygggttttygttatttaygagttttygttttyggtgagttgttgtttttagggtttygagtygygyggtattttttgyggttygaggyggattttttgtagttttttgattatttgttygtatttttygttttttatggagtttaggtygttgtygtggyggtygtttagtagtygttttttttttagttygtygygggggttttttatggtttatttttgggggygttyggtygtttggaatatggygyggaygagttgygggygttgttgygggtgygttgggtygygggttgygygttgttttttygttggggygttggygggygggayggyggtayggattgttgtgggttttgtagygtygtygyggygttttataaayg

SEQ ID NO: 11104 - DNA, 1514 bp, synthetic construct
  misc_feature 1..1514: note = Description of Artificial Sequence: Synthetic polynucleotide
  source 1..1514: mol_type = other DNA
tyggyggygttttttttatttagygtgaaatttaygaggygyggygtttygagtggygggygggtagggggttgtaggatttaygaagttattttygtyggggatygttttttttyggagtggtttttttttyggygtttygttttagtaagaygatatttaggttaaatagtygttttyggttagttygattyggttttggagggagygtttygagggagtttagtyggaggyggagaaggttattyggttagaaggtggggagtygtyggygttttttygtattttygtttttatagtagggggaaaggttttgatygtygtggtttatattatygygtttatttgaggttygtttygttttttgggtttttagaggggtggygtatttygtttttttttgtttttaagtggtygtattttttygygggaygtttggttgggtttagggyggggygggygggygtttttygtattgtygygagtttagygygtagttttygyggttyggttgtygtygyggttagttggggygggtygggggyggggttttagggggyggggattygggggggygggtygggtygggaggygtgggtggggggyggggyggaygyggagygtttttttggttggyggggttaaggggttgagaggagtggggtaggttyggygtyggtaggaagagttagaggggtgattagagagtttaaygtttggtgtttaagatttttttygaggtatgaataagaattaggygtttgggtttttttygttygttttatygtttagtygtygygtttyggaygttygttgtgttttttgtyggyggggyggyggygggattgggtttygggagggtttttggaagtygygagttttagygaaggtagtgtatygtttttygttttttttttygtttttttttygtttttttagttttgggtgtygggtatyggtggtaaggtygttttttygtgagtyggaggtygtttattttgggaygggyggaygaggttttagggtagtygagttyggtagygggggaggygtggagttyggggyggttttagyggygggggygggaggttggttttggttgtagattgygygtttgggtttygtgygyggtttttggttttttgtatygyggaggttttyggattatagggttttttggygggtttyggtatttaggtttgtgtygttgtggttgggygtygggattagtattygagtttygygttttygggggttgygtygtgtygtttgttgtgygygygtagaggtyggatagttyggttgygggaagggattygagygtagggtttgtttygygtttyggaaagtgtttagtttgyggagtyggaggttgagttggggtagatyggygttagaygggggtttgggtgagataygagttgggggtgyggtttgtagaatttgggtttttggaggagtttayggygygttggyggagttttaggygaataggagtatyggattyggtttyg

SEQ ID NO: 11105 - DNA, 2144 bp, synthetic construct
  misc_feature 1..2144: note = Description of Artificial Sequence: Synthetic polynucleotide
  source 1..2144: mol_type = other DNA
gygtygtttttttttygygtttttygaatgttaagtgtattagtttttaattttttttttgggygggttyggtttggttaattttagttgtagattttagtataaatttaggattttttttygtttagtygtttttatataaggattygtygaatatattttgaatttygygttagagygtagttyggaattgtagttygyggygygggtttaggtygggggtygygygtttttagtyggtgatttaaggtygttyggttygggggtgggtgtgggtyggtaggatygattagggtygygygggggtagttgtygggygttyggttatttagyggtgggagtygaggttggttttggttagtygttatttygtygygggygtttgtttygtygggttttygggygygggaggaaggttygygtygttttttattyggygygttttttttttagtgygtagtggtttggtgggttagtyggyggyggttggagygyggggtyggttttgygtaygaatgaatgggygttygggggaygygygygttyggggttgaagggtattaggatygtgaggatygtttygygattttgtttttttttattattttttygtttttttattttttttttttttttgttttgtaggattgagtagttaggygygagygaaaataaatagttggggttgygagygttttygtttyggtttygagagtaygtyggtttagttttttatttggggygttygtttgtttattatgaggaagattygygttaatgttatygttattttgatygtagtttggattttgggtattttttattatttatggtaggataatygagtttaygtagtatttttyggyggtyggggygygtagagggtaggtaggaggtyggagtagtttygygaggatygtattatttygtttattgtgagtaygtttygagygtyggtyggtyggttagggagtygyggygygygtttagattttgygyggyggtygagggygyggggttyggttagggttgagtgttygttgygtygggtyggttttgtatatgttggagtatttttgttygttgttatggtaatttttgtygggyggyggggttggggygtatygattaagggagggtgatagagggtgggggttgggagaaagtgttgtaagtttggtgggttyggygtgygygygyggttgggaaygtggyggttttttyggttttgygttgtyggggtygggagtttgggggttgygggagtttygtgtgtttyggaaggttgtygggtttagygygyggygagygggyggtgggaattattygtagtygagygygtaggtggtagtgygtagtttttttttagttttttgggggtagaggatatygggtgggggygtgggtaggggaaggttttttaggygttgygtttggtttygaatttttttttgagtygggttaatttgaattygttttttyggygyggatatttagttttttyggagttttttgggttgaggagaggtttygtattgtaygygttttttatttttaattttagggttygttattaygggtaggtgggtagtgttagygttygaatttggygatatttttgtatgaagttagtttygygatatttaagygggtagggaaataaaggtagtgtggtatagygggggyggyggyggggttgygggggtttttggygttttggggattygggygggggygtgyggagtygtagtygttttgtagggggygattttgtygtygttttygttygagttttaggtgatagagttgtgygtggttaggtaggggtatttgttgaggygggaggttttggtattygtygagagtgygttygagygggygtatttttttagaygggggyggttggtggaygagagtttyggaygattttygggaattattagggyggggtagtttggtyggatgaggattaggaagaggagagtygagtggggygggggtaaaggagtgaggaagygtggygatttygataaggaaagatttgggtttgggggtggaggggtgaggagattygygggggaggtgtaaggttyggagggttgaggtttgtgtggagtygaattygagaaaygtatttagaygyg

SEQ ID NO: 11106 - DNA, 379 bp, synthetic construct
  misc_feature 1..379: note = Description of Artificial Sequence: Synthetic polynucleotide
  source 1..379: mol_type = other DNA
tygttyggyggggygtttttaygttgtgttttttgyggtgtatygaggygtattyggttgttttgttgygggttttttggttatttgtgggttatagggagagaygygtttatatattttygttygygtttaggatagttgygggagtttygggtygttttaatttaatgygtttttygtaggttgagatgyggttgtttttgttygtgtygttgttgttggttttagygttygggttttyggtgagtgyggttttgtttyggttttyggaggaatttgtaggggagtygggggyggggaygygygggttygtaggtaaygtttttaggaaaggggygatgttagggaagttgggttgggaggaggygagttygtatyg

SEQ ID NO: 11107 - DNA, 637 bp, synthetic construct
  misc_feature 1..637: note = Description of Artificial Sequence: Synthetic polynucleotide
  source 1..637: mol_type = other DNA
tygyggtaygggagtgygtaygygygtyggaggygaaggaggaatttatygtatttatagggyggtygagtgagggagttgttggygggtgggtttggtaattttttgggaggtygaygygggyggatyggygggtgttgggaatygagtttyggtttgyggtyggtagttttygtgggtttgtgaagaggtyggyggtttttgygggygttagttaggtaagtttagttyggtgttttttaggaagttygtttgygggygygggtagggagtygtatyggttatggtggttgaggagggagaggttgttgttygtyggtygttygattttaggttttttttygaygggttygtttyggggagtaggggtgygygggggttgtttttgygygaayggttygggygggggaygtggggygygttgggygtygttygtyggtttaggygygygaatttggygtttttagtgaattattygyggttygggygttygggttygggatyggtttttttttttttygttgagtygyggtygagttggttttttgtattttatttagygtygtygggaygygattatatygagatggtatygagttttttttaaaggtttyggtttgttgaaagtggggyggyg

SEQ ID NO: 11108 - DNA, 959 bp, synthetic construct
  misc_feature 1..959: note = Description of Artificial Sequence: Synthetic polynucleotide
  source 1..959: mol_type = other DNA
tygygggatyggggggatggtygatttttagataygggagggattgagygatgtttaaggagagtaggagaatattgygtttggagatttttgagagttaggggygggtygttttttaaagggatttyggagtttygatttttagttttagttttttttgtgatattatttttyggatagagatttaagttttaggttyggtttygtttagaggttttagggagaagattaggttatygtttattgttyggygtyggggaggaaagaggaggagtttttgtgtgtttatatttttggtygtttagggtagttyggttyggtttygtaattttagtttattggttygggagattttaaaggttttatygttagygtttttagygtttattgtgtgygttttattttagttttgtttgygygtygttttygttattttygttttagtttttgggtyggaagtttttttttttttttygtygtagtttttttttagttttttttttttygtygatgygggaaatttttttygtttygtttygttttttttttttagttgtattttygttyggttttttygtttagtttttaatttaggtttygtttttttttatttatttttygttttgggtygggttttyggttttatygtttttttttyggtttygtttyggttttyggaagttttatttygttttyggtttygttttttygaagttttttgggttttyggtagtyggygggatagaaygyggagagtygtygtttggtygggygtagaygyggtggtagagttygygyggygttggaagygagtggyggagyggygggatttyggyggattygttatggaggaggaggtgagggyggggttyggyggggygttgggttggggttttygagttttttayggggattgyggttttgggtttaggttttygtttttgttygttttattttyg

SEQ ID NO: 11109 - DNA, 826 bp, synthetic construct
  misc_feature 1..826: note = Description of Artificial Sequence: Synthetic polynucleotide
  source 1..826: mol_type = other DNA
tyggtygttagttttgggagtttyggttgggygaygaagttgygggttggggtatyggttgtttttaygggtyggttttgatttaggggttyggttyggagttgttttttyggyggyggggttgatttaattttttttgttygaggagttgtygygygtagttagygtttygaattygygygyggttyggygttttttyggggtttatttttygggttagtygtygygtttatttgtgttygyggttyggttttttttygttygygttgttttagtyggggttgaggtatygggtygggttttyggygtttygagttttygttttttttttttygttttttaattygtttaygttttyggttttttggatggygaygyggatttgtatygtygttttgggttygggtygagttttttygtyggattgggttatggttygygggattgyggygtygtyggggtttttaygtygtaaggtttagttagtyggtyggtagygattgygaygagggggygggggyggtgygagygygtttgtygttyggtttaggggagggataggggtygyggygtttygtttygygtygtygtygtygtygtygtygtygttattatttygatygttagtggagygttygygtaggyggggtttyggaggtggagggyggtttttyggagttttttygayggaggttygtttyggaaggattttygygattttygattatttttttygttttttygtygttgtggggttttagttygagaggaggtgttagggttttttttttttgygtttttttttayggygtygtagggatgggyg

SEQ ID NO: 11110 - DNA, 2156 bp, synthetic construct
  misc_feature 1..2156: note = Description of Artificial Sequence: Synthetic polynucleotide
  source 1..2156: mol_type = other DNA
tyggtygatttgatttttttttgttygygttttayggttttttggttgtygaatatttttagggagaatttgttgatttygggttggagtatggtttygaattggygttgtatgaagtyggtttggtttaggygtatttyggttttygggaggatttggtygtyggtagtygygtttttttttattttgatagyggtgtttatygagggttgttygtaggaggyggaggtyggttgyggtggttgttggggyggyggyggygaggttgygggttgygtygaggygtyggggygttygggttyggtygttaggtttgggggygttttgttttygtygggggaygygtygttttyggygatgagtygtygttttttygyggagttatgtaggtgttygtgattgttgtygtttttygtgtygtygttgtygtygtttyggttgtttagygaggttaggttttygyggaagygtttgtagtygtygttygtgttggatttgttygygtygygggtyggtttttygttgttygttgtttygagggtygagtttygggatttygtgttattygyggtygtygagggggagggygagggtagtggtygtagtyggatgtttttgyggttggggttttggyggttttyggttttttttttttyggygttttttttttygtttatgatttaygttttggtttttatttgttgygggaggttgtagagtygtttgygtatggayggyggtagtttgtttatggygttaggggtyggggtyggatygggtygggggtaggagygyggygtygyggaygggttttaggttygttygtyggttagttygttygtggggaygygttttttgtygtyggygtgggggtagttttaggygtttatgtttgggtaggttgygygtygyggggaggattttagtttygtttygagttttygggttygtygygttatattttttttygggttyggttgggygyggggatttygygttttttttttgtttttttttttttttttggygtttaggggygyggygygtygttyggttttaggygtttygttttygyggggaataatgggygtyggtyggagaggttttgyggtygyggygtttagggaatygtttyggagtgtagagygtayggttygygygggtttygggygtgygtttygygggagggttggttgttygtttgtttygtygttygggttttgtggttggttattygygagttygtttygttttttttgtttyggttygttyggttygtttyggggttttygtygtaatygagyggagtttagygattygtygggtttatattagyggtygtttttttygaagygtttttyggtagygttygggttttygygtttyggaatatttatgaagtygtygtagttygygggttgttataggagyggttttagtagtygggtttgtttatttgggttttttaaaggggtagyggygtaygggtygggggttggaaaggggyggggggygggtttggtaaggggtttaggttagattttygttagattttyggggtyggggtgagaggtatttatattgttgygtttttaaattttttttttgggttaagttgggagtgygttttaagtttgaagtttyggttttagttgygaattttttattttaagattgaagggtggggggtggttttttaatttttttattattaagttttgggttygtttttttttggtatttttgttttttagttgggttttygattttttttttgggaggygatygggttygtttggatgtagagtttyggttttttygtaatttttttggagagggggttttyggaaatgygtygygtyggggaggtttttayggtttttttgtgatatgggtagggtgygaatttygygttagttttttttttgtaaagtttygtagtagttaggtaaggagggygtggggaaatagggagataygtatagggygygygggtgggatttagtttttygaggtaagatttygaggaaatgygtyggtaatagtgayggatgygagattygaaygtygattttygtaygygtttttttttyggtagtttygagaaagggataagtyggttgtagyggggagyggttgggtyggtttttyggayg

SEQ ID NO: 11111 - DNA, 1441 bp, synthetic construct
  misc_feature 1..1441: note = Description of Artificial Sequence: Synthetic polynucleotide
  source 1..1441: mol_type = other DNA
tyggagggaggaattatygtaagyggagatttygggyggyggtyggyggaagggttgggygggaggygtygggatgtyggtaggattttgygttygagggggtagggggttygtgtyggggttttaggygtagattgatggggtttaagtagggaatgtgagggyggggagggygtataayggaagggattaatttygyggtttygagttgggagtaaatttygttttttattttttttattygttttttttttttagtgaagayggtttgggggygggtggggaggygygttttyggagygttttygygtttttttttygtttttygygygygatttatygttttttttttttygaggttagygatggttygggtgygggygaggagttgggagggyggttttygaygtaggtgttagattygttyggtagtgttyggygygttggttyggtttttagttttttyggtygtygtttttygttygtygygtygyggygttaggagggyggggtyggggygygygtygttttttagtaagygggygggyggygttyggtttgagggagyggggyggttttygtyggygtygygygygttgtgtgtgagyggggtygygygygygygyggtaggygagtgagggaaygaggagyggtygggtgtgagtgtgtgggagtgagagtgtgtgggagtggggtgagggagaagttgaygggaygygaggttgtgagaaattgggygagtgtgygaggaygttyggttagtttgygggagtygtagtyggyggaggagaaaggaggyggttttyggtatttygattttttttttttttttttttttttttatttttagtygttyggyggttygygttttttygaaggttttagttyggtttagtyggtygagagygagggaggagtttttygatttaggtgagyggtaygatygttgttgttttygggtgtagagtagtgaggygaaggygygttttttygagtgggygagtttagyggaatggatttttygattagygggggttgggtyggggaggggatyggttygagygygttyggggttyggggttagttgaggtyggtggtygtygtttygyggagtyggtggggagygaggyggggttyggttttygygygtgtgtygggaggygtyggttygtggygtgtgygtgygatygggygagtygtgtygagggggyggygatttygggygtgtaaggagtatggttttttygtyggygagggggtgtggtaatttygggaaygtyggttggagtyggattygygggttgttgatttgttttygggattgyggygatatttttttttttttttttttttataaattttatggagygatygygggaggaggattaygtggtgyggtttygtagttattgtattygattttaygtttttttttttayg

SEQ ID NO: 11112 - DNA, 734 bp, synthetic construct
  misc_feature 1..734: note = Description of Artificial Sequence: Synthetic polynucleotide
  source 1..734: mol_type = other DNA
tygattttgggtatatagyggtaaattttgtttygtaatatygtgtgggttttygygtattttttygygtgagygtttygagttyggtgtagtttyggttttygygygtttttgtttttygtatagygttttygtttygaaggtgttttgataatttygtaggygttattyggagtyggggtagggtagttggggttggaggyggygggygygggayggagttttatgaaagttggaagaagtgattataaatygggattygattttygtagttttggygttygtttttttaygtaggttygggatgtyggttttagtttttagatgtygggaagayggygtyggttagtttaaggaagagtttttaggaggttggggagtaagggtgtygggttttttatgtygggttaggttttttaggagtgtyggtttttagggttattaggtttaggtttgygygaggagggagygygygtttttttttatttattyggttttygtttttaattygtttttyggtttatatttatttgtttggttgtaagygtygtttygggttaggtagttaggtttttatttttagtgyggygygtttygatgtygttatygggattttygttttttaaattagttttttttttattygtaatttygttygtyggggygttygggggyggaggygygagtyggtyggygtygyggagtyggttygtagatagggygggyggggttyg

SEQ ID NO: 11113 - DNA, 935 bp, synthetic construct
  misc_feature 1..935: note = Description of Artificial Sequence: Synthetic polynucleotide
  source 1..935: mol_type = other DNA
gygtgygattygygtttattgtggtttygttttattgatgatygtgaatttgtagggtgttgggttagttttttattttaaggttgggtaggttttyggagtttttttyggtttagatagaagtttttttaggagygggggaggggaagggggygygyggttyggttttaggtgtggtygyggataatgagattttggggatgggggygtatttgygttayggygtttygtagagggttttttaggagattttttygggttttygtygygtygtgggggtggggtagttttgttggttagagtygggtaygggtygggygggyggyggggatygtgatygyggttgygtgygttygygttygggygtttttgtgyggggttttggtaygtyggygggggygattygggtgtyggttygtgygggygataygygygtttttgyggggttgygyggggttyggagyggttgggggttttttgtygggygyggttgggygyggggggygttttyggtygggatgagtttatygtagtygygtyggggttgagygtygagyggggyggyggyggggygggyggyggtttttyggyggtttygyggygttygggtygygygtygttatgttgggtttggaygygtgygagttgggggygtagttgttggagttgtttyggttggygttgtgygttygaggtgagygggtygggtaggggyggggggttyggttggttttagtttygggyggggagtagtttttttttygyggtaattttgggggygygtatggggatttygyggygtygatttttyggttggggtttggtaggggtgggggattttatttaggttttagttttgtggggaagggattaggtgyggaygggtyggtttgggaagyggyggygttgggattttttttttttggatatygtyg

SEQ ID NO: 11114 - DNA, 1054 bp, synthetic construct
  misc_feature 1..1054: note = Description of Artificial Sequence: Synthetic polynucleotide
  source 1..1054: mol_type = other DNA
gygyggttttyggaggtygatattataaygtttgtaagggtyggttggggtyggtatatgattygattttayggtygtttttaggggtggaggggtygttattttaggtttggggaaggaataygaggttttgaggagygaatttgttttaggtgttyggggaggtttggygyggggttgtttyggtttttttttagagtyggggagaggggatatygtaggatgtyggygttygaggyggtagtattaggtttaygggygttttagtttaaatatttttygtgtttttagagyggggattttygttttttagattyggaagygtygtttttttygttagggaygtttgggttttygtagatttygtyggtyggygygttattygygttagtattatggatagyggtygttttagtygygygtttagggttaggttygggttggtttttatygyggayggttgyggggtyggggtagtttygtaattttaaatttyggtagttttygtttagtagggaggggtttygggggygaagagtgggggagaagtygggaaggattyggaggaggyggygggggyggygttaggggaggaataatttyggygtagtgtygatttaggttgaaaaygtttttagttatgggtttgtaygtggagygtyggggttgggggaggtattygyggggtttttttttygtttygttygggagtttaygtttgtyggygtttatagtttygtttttatttttaggttttagggtygagatggagaaattaagtygtattttgagagtttataggagggaggggataggttgaggagyggtygtttgggtatgggttyggggtttggttttttttatttatattygtagygttgttagaaggygttgttttgtttgtggttagttttygattygtgtgtttggtgggagttgtattttygtataggtagttttattgttttttaatttygygtttaygtttttgtyggttttygttgttttttatattttyggtttgattgatttagttygaatattttttatttyg

SEQ ID NO: 11115 - DNA, 1474 bp, synthetic construct
  misc_feature 1..1474: note = Description of Artificial Sequence: Synthetic polynucleotide
  source 1..1474: mol_type = other DNA
tyggaygttgtggtagaggaggttygygygtygtatatttgttgggatttttagttygtttaggattggtagggagattttggaagattagygttyggaggggtgaggtttygttttgggggtaaggtygygaaattayggtttgtagttttaygttaggggtataaagaaaagygtygtygggaatttaatatttgtagaygaygygtagtygtagaggaggyggggygttygaggtttygtttygtatgttaatgaagtatatattatatygtttygtttyggygygagatyggtttaaygttgyggagatttagaggtyggyggygttyggaaatattygyggaggtygaggtagggyggggtygggygtyggggtygggtygttgggygggyggtatagttygggggaggttaaygggtyggtygggygtttyggggaygygttttttttayggtgygaagtggtayggttygtaggggyggggtttaggttatgtgaygyggtygyggtygttattttgttttgyggtgttggtatttagagygtagyggttgaygggtyggatygttttygtygtygttygttygtaaattttygtgttyggttygttttygttttygttttygttatygtttyggtttgtagagtttgttttttttttattygtagatatgttygagtttaagagyggtttygagtatgtttygtttttygtygttatgggygtttyggtygttatggtttttagyggtgagygyggyggygggagggattygggggygggggygygygygttgtttatgttygtagttygtyggggttyggtgtgtgaygttattttgaygtaatttygagttgtygggggygttygggtttygtgtgatagygggygggggtyggygtttygagggttgyggggagtygtygggggttyggggygtagggygtgygggtttggtyggggtgtgagtttygggggttygggtyggyggttttgttagtygggtygtgyggttgygggggtggggyggyggygtygttgttatattagtttygggagyggygagagggaggttggggtgggggygygaggggggyggygygaggggggtygattttgygggtaggtgatattatatttygaaggttttagtgygygggyggyggygygggttyggtttaggaaygtttagtyggtygttggagtttttyggttggtggggagtttatgttttttaygggaggtttttagttttygtttttatggyggtyggtttygagggttaggtgggttttatttataggtaggtattttyggttggagttggttatagttgtttaatattygtgtygttgtgtgggttgtttgggaaagttgggttgagggtttggttyggagagttygyggagattygggtgggagtgtgtggaagtggagggagyggggagatagtagtatyggygttggyg

SEQ ID NO: 11116 - DNA, 357 bp, synthetic construct
  misc_feature 1..357: note = Description of Artificial Sequence: Synthetic polynucleotide
  source 1..357: mol_type = other DNA
tyggagaatttygtatatataygtattygtaaataygygggttttttgygttattaggaagtagtygttagaatygtygggtgttttttaattatttttgggagatttggtttttygttttygttygygygygyggttayggygtttttttttttttygggtttttaaggtyggattatyggtttygttgttatggygaygtyggtttatttttttttattttygygygtttttaygtttttttttygtagggagttggggtttttttttttttttttttaygttygtagggatttataggttgataggagtagggggtygtttgttgttatyggtyggggatttyggggtttttyg

SEQ ID NO: 11117 - DNA, 814 bp, synthetic construct
  misc_feature 1..814: note = Description of Artificial Sequence: Synthetic polynucleotide
  source 1..814: mol_type = other DNA
tygtygggagtttyggggttyggttttagtttygggttgaataagtagggaggggagaggtatttaggtttygttttttygyggttttttttttttagtyggggaggaggagatttaggaagtygygttyggtttyggtgggtggagggtttaggtygygttttttagtttygyggttttaggtttyggttygttygaggyggagttygggaggtyggggyggggtttygggtyggttatttatttgggttgttagttattttagtttygygaatagttggtgtygtygttgtttagtygagatttyggggttttgyggtttattatttttttygataygatatggttaagygtygtygttygaatyggtygtygtygatatttygtttyggttyggggttgaggaggaagtygagaaggaggaggaggaggyggyggyggagggygggggaagaggayggtygtttygggtttygtttgagttygtagggtaggaygagggagyggygyggtgagagaggyggatgaaggygaggygaygttttttttagggtygtgygyggtttaygaygttggggtttyggaggaygaggaggaygaggagtaggyggtggyggtagttttttaygtttatayggttattgttttttygtttttyggtttygttygtygygtygtygttgtygtayggtaagttgggagygagaggyggggtyggtttygtygggtttggggagagaggygggttttgtyggyggggyggggtygatagtaggtagtttygttttttayggttttaggtttttggayggyg

SEQ ID NO: 11118 - DNA, 847 bp, synthetic construct
  misc_feature 1..847: note = Description of Artificial Sequence: Synthetic polynucleotide
  source 1..847: mol_type = other DNA
aygtaaagygtttttttttttattttyggagatggtaygtgygygtttttaygtagtggyggttgttgyggygagtaygttttttgygggatttaygyggggagtgggttggtagtgygygtatagyggyggygagtgggtygtgtaygyggatgyggggtgggagtgggggygtaygygygggygtgggygagygggtttyggtagtgtatatatayggtaggggygggygatagatgtagtgygtgygtyggagtttaagygtataaayggaaagagygggygyggtgygtaggggygggygtttagygggtttggtatgygygttttygttygaggttataaaagtatygttatttgttgttattagttaagtygygygtttagttgtttggagaagttygtttatygtttttagttgttgtttttttygatatggattttgagatttgtttttgtttttttggtgagttttygttttygttygtattttgygtattgygygtttttgtatttgtaaagaaatttaygttttgygttttygtttaaggatatttgggggaagggtttttgattttttattttttatttygtgaagggygggtatgtttgtgtygyggagaatagggagatttggtattttattttttygtgataggygtggggattygagttygtttatattaattttttttgtggygtygttttttttaggtggtttttgtatttgygyggatttttgtaagtgygagggatgtaaatgtattttttgtaagaagagtgagtgyggggattttttttttttgtygtygttttttttgttttgyggagtyggtgttttattayg

SEQ ID NO: 11119 - DNA, 589 bp, synthetic construct
  misc_feature 1..589: note = Description of Artificial Sequence: Synthetic polynucleotide
  source 1..589: mol_type = other DNA
aygggggtaggygtggygtttttgggattgtyggaaaaygaygtgagggaaaaatttagaggttaygaaaaggygaatagayggagggtttgttttaggggagttaagtagttygtttgaagttttttatttggaaatgaygtgtttaattyggygtttttgtagtttyggtygtttttttttgtttaatttygygtttttttagtttyggtygtttttttygtygtttttttttygyggtygtttatttttgagatttttggttttattgagaygtttagttttattyggtaattygyggatattaagygttataaatttaaataygagatttagagaygttgggttttaaaygttttttagagtgaaagatagaggaattaatygaggttyggttgattttagaygtttaaggygataggygttgttaagaaaagggggtgggaygatatttagttgttaagaygayggttttygggtgggyggtttgaggtggttttyggtygttaggygagatttygygggaaaattttttgttagagagattaggagatttggggttgyggtygtttttttyggagtatttayg

SEQ ID NO: 11120 - DNA, 848 bp, synthetic construct
  misc_feature 1..848: note = Description of Artificial Sequence: Synthetic polynucleotide
  source 1..848: mol_type = other DNA
acggggtcgtattcgagtcggcggagtatttttagggagggggcgggaggttttttttgtttagtttcgagtcggtggtgtagcgttcgttttcggtcgcgggcgtagattggcggtcgttttcgggttacgtggtgcgcgcggcgggcgcgttcgaggagtttgcggttgtttttggtttatagcgtttcgggcgaggagagcgggcggacgtcgggggttgggtcggtgcgggcggcgaggtaggcggacgaggcgtagagatagcggggcggtcggggcgcggtagtcggcggcgtcggggtcgcggtttttgttttgtcgtttttttcgcgtcggattttcgcgtttagggcgtacggtggagagggacgcggcggagtcggtcggtagttatggaatcggtttttttcgtcggcgtcgagttgtagttttcgtttttcgttaacgtttcggacgtttattttagcgtttgttttagcgttggcgttaatgcgtcggggtcgttaggcgcgcggagcgtttcgtttttcgttttggtaatcgttattatcgcgttttattcggtcgtgtgcgtcgtggggttgttgggtaacgtgtttgttatgttcggtatcgttcggtgagttcgttgcgggtcggcgtcgtagggttggagttcggggtgagggtggggattacgaatttgagattttaagttcgttttttggatttttcgcgttttcgtattttttgtaggggtatttggggtttagcgagaggcgaggttatttatatcgaggggaatataggaatgtgtgttatcgtgtgtatgtgtgtgtgtggtgcgggggggggagtgcgtcgcg

SEQ ID NO: 11121 - DNA, 1230 bp, synthetic construct
  misc_feature 1..1230: note = Description of Artificial Sequence: Synthetic polynucleotide
  source 1..1230: mol_type = other DNA
acgtagtttcgagtttcgagtttcgtttcgggggttttatttcgttttttcgcgttcgcggttcgtttttttttattgagcgtttagttttcgtagttttttcggtcgtcgagcgtcgtgggcggggttttagggcggcggcgtttcgcggggagggtttttcgtgttgggggcgaggttattcgaggtagtttttcgttcgtttttaatttcgtttcgttttcggagtttataaagggaggcgattcgcggttcgttcggttggtattttttagtcgtcgttagtttcgtcgaggggagttagcgtcgtttttgaggggcgttcggcgtcggagttatgatttttcgtcgatttaggaagttgtagtagaaggaggaggcggcggttatttcggatttcgtcgttcggattttcgattcggaagtcgcgttcgtcgtttcggtttcgatttcgggattttttgtcgtagtcgttatttttgggtttttagcggacgagttgtacgcggcgttggaggattattattttgtcgagttgtatcgcgcgttcgtcgtgttcgggggtattttgtttcgtcgaaaggtgcgtttttcgttcgtttttaggatttgtttagttttttttcgattttttatagggtttgttgatttcgtagtgtttttttttcggcgttcgcggagttttttattttttttttcggttcgttgggtgtttcgatttttcgcgtttttcgttgttgcgaaggtcgtggttttcgtttgtatatcgcgtttaggttcggtggtttttaatttcgcgttttatgtacgttttttttttttttttttgattttttttagtatttttttttttttattcgttttatttggttttttgttttttatgtttcgttttttcgtggttaggtgttttgggtttttaggagtttttcgttcgagggatagagatagttttaggtaagttgaaggttcgagagttttcggtgggagaagcgggtcggtggttgcgtcgcgtgcgtttttattttgaggaagtgcgtggggagtcgttgatttcggatagtatattttttcgaggggatttttcgatttttgggttgggggtttgtcgtttggttttacgtttgacgtacggggcgcgagggttattgttttttggatttttgtcggaatcggacgtagtgggaggggtcgtagggcgttcgcggggtaggaaggatgcgggtcgcg

SEQ ID NO: 11122 - DNA, 1094 bp, synthetic construct
  misc_feature 1..1094: note = Description of Artificial Sequence: Synthetic polynucleotide
  source 1..1094: mol_type = other DNA
gcggcgttaaaaatagttggggggagggtgcgggggcggcggagtttgtaatttaagtcgttttagttttcggggggtagatttcgcggtcgtcggtcggcgttcggtttttttagtattcggtttagggttggagttggttgtagggttggttcgcggcgatttgggtagggtggcggttgttttttttttttttatttcgtttcgaggcgtagcgcgcggtagagcggttcggtgttcggcgggcgggcggttcgggcgggtttgcggtcgggatgaggacggcgttttcgttgtagagcgttggggcggcgcgggtcgggagttcgttggcggcggtcggcgtggcgggcggagcgggtttcggagcggaggtgagtgcggatgcgtcgtttgggcgcgcgcggtgtttggggatttcgggttggaacgcggggcgggggtgttatcgggttgcgcgggggttttcggttcggttttcgtttttgcgttttcgggggtcgtttttcggcggggtcggatttttttagcgttcgcggcgttcggttcggttttttcgatttttttttttcgggttcggacgtgcggggtagcgagcgtcggggttcggcgggggtcgtagttttgttcggagcggagcgttggtagcgcggggttcggtttcgtgggtagtttgggaagcgttcgggtaacgtattggcgagggtcgcggagcgaggggttcggggagcgggattttcgggcggggttgcggggagcggggttcgggtcgttttatttatcgcggatcggagtcgggggtgttttagtcgtgtcgtcgtttttttcgggtcgttcgttcgggcgtgttggtttcgcggcgtttcgagcgcggtataggtttgcgagtcggcggtgttagcgtttcggacgggggtgggagttttggagtttattttgggggagattacgtcgtattttcgtttagtttcgcgtatttttagaggtttttgtagagtcgggaagttggttggacgtttagattcgtggggacgcggcgtttcgcgtggcggcggtcggaagggaaggttaatggggttcgggggattttcgcg

SEQ ID NO: 11123 - DNA, 1979 bp, synthetic construct
  misc_feature 1..1979: note = Description of Artificial Sequence: Synthetic polynucleotide
  source 1..1979: mol_type = other DNA
tcgttatcgttatcgttttttttttagttattttttatattcgttcgtttattttttttttaatattttttatacggttgttcgtatttttgttttttttcggtttacgcgcgttttttgtaatttcgacgtttttaggtttttagttcgtttttttttttcggttcggagttcgagagtcgtttgtttttattttaaaatagcgataataatagggacgttgagaataataattacgattagtacggcgaaggcgtttttttcgcgggttagaggtcggcgttttagtttcgtagaattcggcgttcggttagcgttttttggtagtttttttcggtagttttaggtttttaagatttgtaggttcgtttcgaagtttttcgttcgttttttacggtcgtttcgagttttcgaggttcgtttcggagttttttgttcgttttttacggtcgtttcgggtttttacggtttttaggttcgtttcggagtttttaatcggttttttagagtcgtcgcgggttttcggttatttaggttcgttcggagttttcgttcgttttttacggtcgatttaagtttcgtcgattttttaggtttttttcggagttttttatgggttttttacggttatttcgggtttttaaagattttcggttgtttcgaattcggattcgtaggttcgtttcgggatttattattggttttttacgatcgtttcgggtttttaaagattttcgtttattcggtttcgattttttaggttcgttcggaggttcgcggcgtagtttcgtcgtcggggaaggtttgtaggtcgtaaggtcgcgcgaatgtttcgtgttcgtttcgattatcgtttttagattagcggcgttttttatcgtgtttcgagggttgcgcggtttcgcgacggtttagcggcggggcgcgggcgttgtttatgtagttcgcggtcgcgtttttcgggtcgcgcggttcgagcggtaaggcggcggcggcggcggcgcgggttcgggttcggtagagttgcgagggacggcgggaggcgagttcgtttttcgggcgcgtttacggttcgggcgagagtcgcggttttcggtgcggacgttattgatggggcgtttggtcgcgggttcggcggcggcgttttttcggttggggttttcggtttatcgcgtatcgttttagggcggtttttggttttaggatttagcggcggttgcggcgggagtcggtcgtatgagacgttttcgtttattggttcgtcgtattcgttatcgttattggttcgtttcggtcggtcgtaggggttgtgtacgttatagcgtcgtgagttagtgcgttaatggagtgaaggagagaggcgggattgatagtttttttggcggttcggaggcgggattaggaggacgtttcggtaacgattgggtagggttttgcgtaagggcgtatgcgatattggaagtagcgagtaattggattggttgttttcgtcgtaaaggagggtgggttttgtattttcgggtttgacgattggtttttttaagtgtcggaagtaatagggatgtcgtttggaaataaaatttggtattgaagcgtagggagataaaacgtttatttttagagtcgaggcggcggttgtttgtcgcgtgttcgtggttttttgtttgttttcggatatttcgggttacgttcggttcggttttcggtcgcgttgttttaacgggcgttacggggtatgaagagttttgggcggttgcgaggggagggtatcggggtagcggggcggtcgttcggggttttcgcgcggtgatttttgttttgtcgtcgaagagaacggttttcgggcgcgtcgcggtcgcggttttagagtttttgggtttcgcgttttgagagtttgagtcgtttgaggaggttaagcgtttacgaatcgtattttttgttttgttagttagttttttaatacgcgaaaaaggtagacg

SEQ ID NO: 11124 - DNA, 1930 bp, synthetic construct
  misc_feature 1..1930: note = Description of Artificial Sequence: Synthetic polynucleotide
  source 1..1930: mol_type = other DNA
tcgtttaggtagcgcgttgtttcgggtttcggtagggtggggattggtcgcgaaggttagagaaggtaatggtaggggaggttagtttttgtcgcgggtcggttgtagagcggacgtttcgttttgttttcggtttttttttcgttcgtcgggttcgtcgtgtcgaataattgttgttcggagttttcgtgacgcggagttttaattgttgcgattcggaagaagcgaaaaggagtttttttcgtttcgtattttgagcgttcgggcgtgtaaacgtgggtggcggagagcggttgttttttttttttttgtttttttttttttcgcggcgttttcgtgtgtgcgggtgtgtgagtgcgtgtgtttttttcgtttattttcgtatacgtttcggtattagtgtaggcggcgagtcggcggtttttcgttcgttcgtttcggtagttgcgttttcgtttcgtttcgtcgtcgtcgtcgtcgtcgtcgtcgtcgtttttgtagtcgtagtcgggtatggtgagtgagtgaggtttagtcgtcgcgcgttttttcggttcgtcgtcggattttagttttaatcggtttcgttttagggagttagtttgcggcgggagcgcgttgcggggtcgggcggttgggggattcgggcggtcgagttgcgtttggaggggcggttcgtgcgttttcggttttaggcgcgtagggtcgcgggatttcgttttgggagcgggttttacgtttttttcggtttcgagttttttttttcgagggttgcgcgtatttttttcgttcgtttgttcgcggttttttttttgttttcggagcgttagtcgttttatttcgtgatcggtttttcgttttgtttcgtaggattcgttcggacgggattacgtcgtcgtcgtcgtcgtcgtcgttcggagtcgcgtttcgggttttgtttgagtcgagtcgcgcgcggggtcgtagttatcgtcggcgggggatggggttgtttaggaggcgcgtcgagttcgtagggggagcgcggagtcggcgcgtagtttgagagttcgagtagttcgcgtcgggtcggttcgtgcgtatcgcgcgtcgtcgtcgttattgtcgttcgcgtttcgatggcgttatcgtttcggagtcgttgatcgtttagcgtttttagttcggttcgcgcggcgggtttttcgagttcggttcgtcgggggagcggtttgtcgcggaagttttttcgcgttttttcgttcggtttcgttatggcgttgcggcgttttttgttgttgttgttgttttcgttggagtttttggatttgttgtttagcgtttacggagttcgcggtcgcgtcgttaatcggattttgagtgtaggcggcgttgtcgtcgggggtcggagggtcgggggcgttttggtacggggcggtcgcgagttgaacggtatcgttcgggcgttcggaatttcggaggcgggaagtcggcgggggtagttcgcggcggttgtggcggcggcggttagcgcggtcgttatttacgagacgtgttggggttattacgacgtgagcggttagtacgataaggagttcgagtgtaataatagcgagagcggttatttgtattgttgcggtatttgttattatcgtttttgttgtaagaagcgttacgagaagttggattagcgttagtgtattaattattagagttcggtgtgggtatagacgtttagtattaaggtggtgtcgtcggggttcgagaataagtacgattcggagaaggataagattaattttatcgtttatattatttgcggggtgatcgttttcgttatcgtggtcggcgttttcgttaaggttttttacgataaggtttatcgttttttacgggagatgaatatttataggtgagagcgtcgcgtgtcgcgcgtttcggttttttcgcg

SEQ ID NO: 11125 - DNA, 3177 bp, synthetic construct
  misc_feature 1..3177: note = Description of Artificial Sequence: Synthetic polynucleotide
  source 1..3177: mol_type = other DNA
tcgcgttagtttcggggtttttattttggcgggaagggtaggtcgattcggtagattgcggtttttcgggagggaagaaggtgttagacgcgcggagtaattataaatagttttttttttttagaagacggtacggggtttaagatttaggcgtcgtatatttagaatgagagtagagattttcgttaggaaaaaaaggtatttaggggatttgtttattagtatgaaatgtaaatgagttcgttcggttttatttatataattttgtgtatggattcggcgaaagggtaattagggagacgacggcgtagtagttattttgttattttttttattttttttttttatcggtcggggcgggaattgagacgattttaattttttgcggtggcgggaggtgcgcgggggttgcgtgggtggtgtagttttaggagagtgaataacgtttaggggtgatggttttagtaaagtgaggggtggtgatggaggttattcgatttatttcgtcgttttttcgtagtggcgtaagcgttttaaaattttcggagagggaattgattgatttattaggtttcgtcgtgtttatttttcgtagatgttggggaagtgtttttcggcgtttaattttcgttgtttttttttttatcggcgtttagtatattcgcggcgtttcgttttcgggtatttatagttttttggagtggcgtcggcggtaggagagagttagagtcgattgagttttagaattcggggaggtaggcggggtaagggtcggggtttgcgcgtgcgtgtgtacgcgtggaaagtataaatttacgagggttcgttgtcggtagggttaaggtgagtgagtgaaggcggtagattcgcgaagttttagtttcgcggatattttttttttaagttatatagggatttaagagaaattgaggtacgaagttggggggtggcggtggtggggattttgaaggtcgagtcgataaagtttagttttgtgttttcgtttttttttatatattcgagatttttataggtttttttttaggggttttcgttttgtttcgtagttttttttggggattcgggttttgcggtttagcgcgatttgtttggggttacgtgtttaagtacgaagtttttgcgtggagtttacgttttttaaaaggtttttaggggtaaagggatgaagtttaggagcgttaatgtgaggttaggtttagcgggttagggttacgaggttagggtcgaagttttagaattgattcgggagtatgattaataagtttaagagatttgtggaggttacgtttagattatgtttattttagtttttttcgagtttcgttcgtttttttaagattgggtttttttagtttgaagttttatttttaggatatttagtttcgtttttttttttttttagtttcgtagttaagtttaattttagggtgggagattaattaggtggagatttgggatttcgttttgggattttttggtgataatttttattttcgtgtcgtttgtttttttttttttttaggttcgtttagagttgagtttcgtttttcggttgttgtttaaattaggggtcgtggataaaggatgtttggggtttgcggttttacgttaggatttcgcgtcgaatattttgatttttcgggttttttttaagggagttttaaagattttaatggttaataggaaagtgggttcggtttgggtagtagtttgattggttttagttttcgggagcggatttaggggtaaggggaggggagaggggcggttttgggttttggggtgggaatcggattttagttgtggttttttttttgcgttttcgttcgtattgttacggcggacggttaatgggcgcgcggttcggggtcggcggcgttcggcgattggttgcggggttgtttgggggcggggtcgaggtttgaagttgaagtgagggatttagttgtggtgtgcgcggggtttttcgtcgtcgttttcgttcgttcgtttcgcgtttcggtcggaggaggaggttgtggcgtcggcgatagttacggtagcggtagttatcgcggcggttgcggcggcggtattttcgtttttattttcgttcgggattgttttttattgttttttcgtttttttcggatagtgagttcgcggcggggcgggggaaggagtcgtttttattttttttaagtttatttttaaagagatttttttttttttttttcgtcgtttggcgcggagtcgggacgatgttgattttttagattcggttttagttgcgtcgcgggaagagggggcgttttttttcggattttcgtttttcgtcgttgttttttttttcgttcgttttttcggggcggtttcgtcgaaggtagcgtcgaattcggtaatcggagtttgggcgcgaagcgaagaagtcggaataaagtgagggggagtcggtcggttggttcgggaagttttaggggcgtaggggaagcgggattcgcgtcgggcggggtttttttgcgtttcggcgtttcgcgggtagtatgtttttgcgggtagggggagttgggttgaattggttttttcgggggtttagtttgcgttttagagtttattagatgtgttttcgtcggggttttcgggttgcgtgaggatattttttttgaggggcgtcgtttgttttttttcggatcgttcggggtttcggttggttagaggatggacgaggaggaggatggagcgggcgtcgaggagtcgggatagtttcggagttttatgcggtttaacgatttgtcgggggtcgggggtcggtcggggtcggggttagtagaaaaggattcgggtagcgcggatttcgaggcggaggggttgtcgtattcggcgttggtttcggtggtttttttttatttgagttaggatagtcgttcgcggagttggtgttttcgtacggtttgtaatttatatttttcggggtacgacggttaggcgcggggttagaagggggacgggtcgtatcgtcgggggtcgggggggaagaagatttatcgttaggtgagtcgaagtgagttcggagggtaggcggatggggggggggttgttagggaggggagggggtattagagtgggagcggagacgcgagtaggtttcgtcggtaattcgggtttattttatttgcg

SEQ ID NO: 11126 - DNA, 2195 bp, synthetic construct
  misc_feature 1..2195: note = Description of Artificial Sequence: Synthetic polynucleotide
  source 1..2195: mol_type = other DNA
tcgttagtttcggtcgttaagtaaatattttttttaggagttcgagaagtcggtgtgcgaggggaggaattagtttgaggtttatcgttttagtaatttcgggtgatttatagagtttagattttcggttgtcgtagatcgcggtaggtacgtaaataagtagttcgggagatattttttttttttttagttttcgtttttttattttgttattttttagttcgtgattagttgttttttttttttttcgcgggcgtttagggttgagtaaatatttcgggtcgttcgtttcgttattagttggtttcgatcggcgtatcgttggcgattttttaggtaattcggcgttatgagaatcggtatttcgagattcggcgttttgtttttttttcgcgtttttagggttttggttaggtttaataattttttttttttttgtgcgttttagtttttacgggtttttggcgcgggttaattaggtttcgttgcgggtttttaggattgcgtattttatttttcgcgaggttagtagtttcgggggaaggcggtcggaaaattttttgtttatcgggttggataagtattagtttggattcgttttttaatttttgcggtttagttttagtagatttttggggtcggaggggaaagggtggtaatttatagatttatttcggaatagggagtggggggtggggttggtgggaatttgattttttggaaaggacggattcggagttagagttaacgtgtttcggagcgtagaggtttagggggtcgcgttaaatattgtatttcggggaataaaatcgtgaaggttaattaggataagtcggagtagggaacggggacgtcgggaggggagagcgcgtttcgagttgggtagaatttggaacggttataggaaattcgggcgcggggtagtcgggtcgagggggatttttgtttacggtttagagtggtttggattcggtttacgcgtgagaggagcgtttggtgacgattttacgtacgtttggtgattggtggaggttttagagaaggatcgtgcgtgtaaaaggcgaatttcggtgtgcggtgtgtttacgtgtgtaagttggggaggggagggggcgtagaaggcgtgataaagacggattttgttttgagtgtgcgtttcgtttcggttcgtttttagcgaattgtgtttgaagtgtgttttacgggagggttaggacgaaggtgataaaggttaggtgttttttacggagacgcgttaaggtagtttcgcgcgtgttcgtaggcgcgttttttggaagacgcggtggggggtgcgtagggttgtatttttatattaattgtttcggcgaaggtcgagtttagaaagtgagtgcgcgtgagtgtgcgcgcgttcgtatgcgggggcgtggtagttaatagtaataatttatacgtcggtagggttagaaatttttattttttttattagtcggaaagtacgagtcggtttagtttggaggtgagtcggggcggggagggtcgggtaggttttgtttttgtgtaaacggagcgtacgtatttggagcgcggcgggcgttcgattagcgttttgaatggaggtgatgtaacggtgatgtaggttttagtttattttcgtcgaaagtaaggagttttgtttggggataggttcgcgcgagagcgagtaatttagcgcgtttggtttagtttcggttttagggagaggtaggttttgcgtttcggttcgggtttcgttattttagttaggatcgggtttggtttagcgtttcgcgtcgcgttttttttattttcgttcgtttttcgtttggggttggagttggttttaaacgttgcgttggagcggggtcggcggcgagttttaggtaagggttgttgttttttcgtttcgtcgttcggaagagtcgggtcgggacggcggggagtgggcgagggtagaggcggggggattggatattttgcgggttggggacgtcgcgttaatttcgttcggtcgttgaaagtttttaaattcgagtcggttggggattgggggggtgggggagttcggcgttgcggttcgggttggagggaggggaaattattttataatcggggtttttaagaggagtttttttatcgtttgtttttcggtgggagttcgcggttattttttttcgtgggtggcgttttttttgtcg

SEQ ID NO: 11127 - DNA, 2063 bp, synthetic construct
  misc_feature 1..2063: note = Description of Artificial Sequence: Synthetic polynucleotide
  source 1..2063: mol_type = other DNA
tcgaggagtcgtggaatggaggattacggcggcgtacggagtatcggggaggaatcgtggggtgcgtaggcgtcggagcgttcgggttcggttcggatcgaaggtttgcgcggtgaaggtgtggtgtttgtgtttcggggaaagggttgttttttcgggggattgtttcgtagcgaggtttgttttgttcgtagttgggcgttttttggggagcgattgagcgtaagggcgggtcgggaggcgcgaggcgagtacgatgttttagggttttaaggattcgtgtgcgtgtgcgtgtgtaaagtggggcggtgtagggcgtgtgtacggtacgggcgagacgcgcgtcggtgcgggcgtcgggcgtcgtcgggcgtaattatagtataaagttcgggcgtcgcggggcgttggttcggagaatttatcggacgcgtagaatcggatcggtatttttttcgttagtattttaacgcggagttatagcgtttagggatcggagggtaggcggcggcggtaaaggatattacgtaagtttttacgtaattttttcgagtagtgtaagtttttaggattggcgcgcgtttcggttattcggagcgcgtatcgttcgtatttcggcgcgtttttcgcgcggtgtagggaattatagcgcgggcgggtattaaggggaaaggaggaggcgtggtttggtcgaggagttaatgggtcgggaggggcgcgcgggggaggagtttaggtgtagagtgtcgattggttagttcgtttttcggtatgtagatacggtgggagttacgtgttaggggtcgggacgattttttgttggaggttaacgcggggcggggaagggggcgcgagcgtttcgtttggttgaagcggggggaggggggtttttgttagttagagtaataagatggtcgcggtggtagtttcgtattttagcgcgacggtttcgggagtcgtagtcgtcgtcgtcggtttcgtcgtcgcgtagttttgagcgtcgttcgggtcgttttttgatagggtagttttagcgttcgtcgcgttttcgtcgtcgttatcgtcgtagtagtcgtgggttcgttcgagtcggaggcggagggagcggagcggtttcgcgtttagtcgttcgtagttgttatcgtcgtcgtcgtcgtcgtttaggattcggatttcgtcggagtcgtatttcgtcgggcgtgaggaggaggacgcgtcgcggcgttgtcggggtcggatttggatttgtcgggacgcgtcgtcgtttattcgttcgcgtcgtcgtcgtagtcgtcgtcgtcgttcgcgtcgggatttgagttcgtggcgtcggcgttgagcgggttttcgtcgttcgcgtattttcgaggttttcgggcggttgttcgtgtcgtcgtcgtcgttaggttcgcgttatcggagtttcgcggagtcgtcgtcgtcgtcggggacggagtttaggtgagcgcggtagttcgttcgtttttcgtcgtagtcgtaattttgtcgggaggttcgcgggttttttgttcggtcgagtcgagtcggggcgggcgttggtttttagcgattcgcgtgcggcgttaggtttcgggtcggtcgggtttgaggggagcggcgggaagcggtcggggtcggggcgcgtgtgtgttagtgtgagacggggttgtgtagacgttcggtgtgtattataattaaacgggagtggaatggagggttgaagatggatgtgtttttttttttttaaaatttatgtagcggtgaaattcggtttttttcgggtagtttttcgtagattttgtattggtgatggtaggcgcgaattcgtcgtgttttggtgtaggagttcggtgtcgttgtttgggggaagagaaaaattcggggcgtgttgcgggtgggcggagaaggatttttgggcgttttgcggttttgaaattaggtggattttttaacggtgttgcggattgcggagtaatgcgtatgaggaaaacgagtcgtataatatttgttttgttattagataacgtaattcgagcgtttggttgtcgtttttgttttaagcg

SEQ ID NO: 11128 - DNA, 816 bp, synthetic construct
  misc_feature 1..816: note = Description of Artificial Sequence: Synthetic polynucleotide
  source 1..816: mol_type = other DNA
gcgttcggagtgggaggaggggaggcgttgttcgacgcgtttttttaagttttcgcgttttttttcggcggcggttgttcgggggcggtggttcggcgtcgtttttttcgatcgttttttttagggtttttttttcgtgtcgcggttaggttgttcggtcggcggcgcgttggaaatatgaagagacgttgtagttgcggtggcggtggcggttattgtagtttagagcggcgtatgcggcggtcggggcgggacgcggggtcgggcgcggagaagtcggggcgggcggtagagaggtcgggacgcggatcgggtcggggcgtttatagtcgttcgacggcgtttagagagcgcgcgtttcgtagtttcgcgtttagttcgtcgggtatggggcgcgcggtagtcgtttgaagtttcggtttggttcggtcgtattcggtcggaggcggagggtagagcgcgcgtttagttgttcgggtattaaatcggagcgcggcgtgcgggaggttttagagtaggattggaaatgttttggtcgcgtcgttttttgtttagatatttgttttcggtttttttgttttacggtgagttttcgagggttattcgagcgtttttagtcggcggaggtagttcgggcgtcgcggagttcgcggaggcgtcgggtttggatcgcggtacggtttatattgtttttttggcggggcgggttcgaggggagtttcgcgtttgtcgttttagttttgggagagggggttttgtttatttttcgaggtttgggatcgtttttttttagggcgttcggagttttttgttgcg

SEQ ID NO: 11129 - DNA, 368 bp, synthetic construct
  misc_feature 1..368: note = Description of Artificial Sequence: Synthetic polynucleotide
  source 1..368: mol_type = other DNA
tcgttttttttatataggcgcgtcgggaggtttcgttttttggtcgcgcgattcgggtatttacgtttcgcgtagcgtcgcggtcggtttcgcgtagtagtattattcgtattatttcgttgtggtttatttgggacgcgatttataggggcgttgtttcgttttgcgggaagaggaggcggcggtcgtcgtgattggggcgttcggttttattcgtttatagaacgtttttaatattaggggtttgaaagcgaaaatttcgggaaggtattttttgatcgtagattatattttgtagttgatttatatcgtttaggaggtagtgagaaaagagggggtgtgtgtagtttacggacgtagacggtacg

SEQ ID NO: 11130 - DNA, 1411 bp, synthetic construct
  misc_feature 1..1411: note = Description of Artificial Sequence: Synthetic polynucleotide
  source 1..1411: mol_type = other DNA
gcgggtttttatttcgtcgttaggagttttttttataattttgagaatcggggtgcgaagaaagaaagggcgaaagggtcgtttaatttttagagagtagttagcgaaagattcgaggggttttttttcgtaggatttcgaataattgtagtatttttttagttcgcggggtttattaaggagatttttataaataatagtatttgcggcgaaggaattattttcgtaaagggtagaagcgttagattttattagttaattatttagacgcgtatcgcgattcgtaagttcgggtacgtttcgttcgggcgtaggtagcgggaggggtcgggtacgttcgtgggggtggtttgggtacgggtttgattcgggggcgcgttcgggaggggtttgggtttgagtcgggggcgcgttcgggggagtgggttgggtttggggcgggggcgcgttcggaggtgggggagtttggggtgggggcgcgttcgtgggggtggggtggggtgtttggttcggggacgcgttcggggaggcgtggtttgggtttgggtcgggggagagtcgggtgcgtgttttgggtttgcgcgggggagcgcgtttggtgtttagatgtttggtatcgagcgggtgggggacgtcgggttcggagtcggcggtaagtttttttttggtaggtaataagttttttttgtagttttgaaggcgttttggttagggttattttacggttcgggtttttagagtttttttacggtttcgaattcgagtagtttttggtttttaattcgtttcggaaaggtcgtttttttttttaatgtgtggcgcgtttcgatcgttttttattcgtggaataaaagagtagttttcgcggagcgggtttagagtttgttcggattgttcgatggttttcggttttttgagcgtcgcggttgtcgggttttgtgttcgcgcggggggcgggaaggacggtcggggtttttagtgcgcgtttcgcggagcggcgcgcggcgttcgaattggaaagttgtcgtcggcgtttgtcgtttttacgtcgttttagttttttttcgcggggcgttttatttattagttaggagattgggcgtagggtcgtcggggcgggcggggggtttattttgtttttgatttttattgcgttgtaatcgtagaatcgtaaggtttgagatttgtgaaaatttcggtttatggtttcggtttcggttagtttcgtcgtcgttttcgttttttaggggtcgtagaaagattttcgggggcggcgtttttaggtttcggtttcggtttcggttcgcgttcgtttggtcggcgggttgttttcggtgttgcgggttcgagttgggttggtcgcgcgttttagggattttaggggtcgcgcgcgggaggagcgcgggggacg

SEQ ID NO: 11131 - DNA, 1487 bp, synthetic construct
  misc_feature 1..1487: note = Description of Artificial Sequence: Synthetic polynucleotide
  source 1..1487: mol_type = other DNA
tcgtttttgtatttcggggacgtgattttttttttaggttgattcgtttttcgttttgtcgtttttaggtggaggaggagttgacgtatttttagaagaaattaaaagggatagaggacgagttggataaatatttcgaggatttgaaggacgcgtaggagaagttggagtttacggagaagaaggttttcgacgtacgtgtgtagggatgcgggagttcgcggcggggttaggtcggagtttcggggtcgggaaggcggggagagtcgtagggggaggaggaagaggaggaggagaaggcggcgttttttagcgttttttttaaataagtttcgaaaaggggtattttttagtagttgtggttagcggtgtcgacgttaggtttttttttagcggtgttgacgtcggcggttcggtcgggtgattttatcgtttcgacggtagtcggttcggggggcggggagaggcgggggcggttttcgcgtaggtaaaggtttggggggtcggggcgcggttgtgtagttttcgtcggagtcgagtttagtcgagcgttcgtcgttgttcgtgcgtttttgcgttttcgcgttatggtcggttttaattttttggaggcggtgaaacgtaagatttaggttttgtagtagtaggcggacgaggcggaagatcgcgcgtagggtttgtagcgggagttggacggcgagcgcgagcggcgcgagaaagtgagcgtttcggtttcgggtttcgtattcgtagttttttttttcgcgcgttttttttttttttcggtttttcgcgttgttcgttcgcgcgtagttttcgggtcgtttttttacgttttcggacgtcgatcgtcgatttatatttttgcgttcgtagttaggattttttatttttttcgtcgtttttttttttgggtttgggataggggagggggcgtcgttttcgggtcgggcggggtcggttaagcgggaaatggggggatggggcggagggggtgagcgattttcgggtggagaagtggagcggcgggagggggcgtatcgtgtaggtttcgatttcggggttggcgtcggggtttcgggtcgaggggaattcgcgatcggatttgtgggggagaatgaggatgaaaacgtggagtttttattgtttagggtttgatcggtcgatagggatttcgacgggggatcggggatttggggagggggtcgtattttttcgtttttttcgcggtttttcggtttttgtttgtttttttgatcgtttttaggggcgcggcggcgacgtgtttgttttaggcggcgggggggatggggggtggaggaagtttagttttaagtcgttcgtttttttttagttgatttttgcgggaatcggggcggcgggattttgtttttttttagaaggtttcgggaacgttggcgcggggttttgaatttacgatcgtttgagcgtttgttgtgcgttttcgtcgcgagtcgtagggttcg

SEQ ID NO: 11132 - DNA, 602 bp, synthetic construct
  misc_feature 1..602: note = Description of Artificial Sequence: Synthetic polynucleotide
  source 1..602: mol_type = other DNA
tcgttcggttaagttattttttcgttagtaggtgaggttcgtgaatagttaagttttttttggtacggcggaatcgtagtggacgcgtggaggggtttcgtagaggagggatttttgtttgggatgcggggagttgtagttttttatttgtatttagtttgttagttgtacgtttgtaggattataattttagtataaagtaggattgtagggcggtgcggatttttggagggagatagcgcggtgcgtttttgtcggttatgttggttggggtggtgttttaggcggttttagtcgttagttatagggcggtcggattataattttagtatataacgggagtggaggtggtgattttgagagagggtttgtgttgtgcgcgtttcgcggggtatgttgggagtagtagtattttagttgttttcggtcgttggtcgtagggttgcgggattataattttcgtatgaaatggaagagagggtggtgcggatagtttgaggaaggtacggatattttgagggaggtatggatacgttgagggaggtacggatacgttgagggaggttacggatacgttaagggaggtatagtagcggtgcgcg

SEQ ID NO: 11133 - DNA, 628 bp, synthetic construct
  misc_feature 1..628: note = Description of Artificial Sequence: Synthetic polynucleotide
  source 1..628: mol_type = other DNA
tcggtattcgtcgtattatagcggatgggtgtatgcgggcggtgattcgagttcgcgcgggttgcggaattttttatttattaacgtcggcgtcgttatgggtttagggggttgggtgaggtcgtgagagtcggcgaggaagtcggttttgcgggttcggtcgatttcgggtttcggttttgggttgcgagggattttagttttcgtcgtcgtgtaaaatgtatataaggttcgcggcgtcgtttttgcgcgtcgtgaggatatagggttgtcgttaaggttttaggaagggttttgtagacgtttgtgggggtgggatcgcggttgatataaaagcgtgtaagtgggttttattttttttattgttcgtttttattcggtttcgaaaagtggtttttgtttggcgttttatttagtgtagcgttggtaattatagtagtcgtaatttaacggcggacgaagattggacgtcggaagtttcgtttacgtcgttacgggaacgtttttttgcgtttttcgtttatggtttggggtcggttttcgttttttgtagtattgttttttgggtaatgtagtttgacggaattcgggtggtatttggagcgtattttttgttttcggtgaggcg

SEQ ID NO: 11134 - DNA, 215 bp, synthetic construct
  misc_feature 1..215: note = Description of Artificial Sequence: Synthetic polynucleotide
  source 1..215: mol_type = other DNA
acggagggacgggtcgtgtagtgtagtcggcggggttagggttaggtcgagggcgcgaggtggtagtcggttcggggaggcggaggttgagcgagcggtggtgtttgtggagttgtcggttgcggtggaattatgaaaaatagtaggtatcggagtcggtttttagtttcgattaggggagatgggatatgataggtgcgattaatacgtagtcg

SEQ ID NO: 11135 - DNA, 2638 bp, synthetic construct; identical to SEQ ID NO: 6376
  misc_feature 1..2638: note = Description of Artificial Sequence: Synthetic polynucleotide
  source 1..2638: mol_type = other DNA

SEQ ID NO: 11136 - DNA, 2172 bp, synthetic construct
  misc_feature 1..2172: note = Description of Artificial Sequence: Synthetic polynucleotide
  source 1..2172: mol_type = other DNA
acgggatgtcggtttcggtcgtttttattaattgatttatgatcggtttggttagggcgttcggtagcgagagcgtcgtcgcgtcgttgggaggtagcgttagcgcggggaagaacggcggttggtgatttagtatcgcgtttatggcgaagttcggcgttcggtgaggtaggaacggatggtaggttatgtttgttttaggaatgatcggattttttatggagaggtttatttattttaggcggggcgttgggttttagtcggggataagttcgtagttgttgtgttttgttgtttttttgttgttgtttaatagtagtatataatttaaaaggggggaaaaagtaaaataaaaaagaaagaaaaaagaaaaggaggtagaaattataattaatgtattttaaagggaggaggggaagtgttttttggagaatgggaggtcgtttttaaagagggtaaggcgaaaaattagtaaatatagtcgcgcgggtgatcgtttttgtgttttgcgtttttaaaaagtcgtttttgaacgtcggttttagaagcgagaggagcgagtagggtttcgattcgcgttcgagttttgtcgttgagttcgaaatagatattttagttttgcgttttaggaatttttttttagtttttaggttttttgttgtaaatgtgaaaggtttttttagaagattttttatttttttttttttttttttttcgttttttatttgttttttttttttttttttttgttggtggcgtttgtagttgtgttagattcggttttaatagggagcgagagagcggaaaaagttttttttttttaaaaaaaaaaaaatttgatttaaatttttttttattagcgttattaaaatttgaattgtaaattggttttcgttcgtcgtttttttttttttttttttgtttcgagttttcggagggtgtttcggttttaatttaaattttgttgggtttttttttcgtgttttttttttttttttgttttaaaacgtgagcgaattcgttttttaaatttgtgtttaggcgcgtagggtagggaggatttagagggggaaaaaatggaatagagggaaagagagggaggggagagagagagagagagagagagacggagtcggagagggagggagcgagagaaagcgagagtttttcgttatttttcgtcgtttttagaatttatcgggcgtttgttcggcggttttagaaggtcgggttgcgttgtgggttgcggggagtcggaggttttttgattggttttttgacgttttcggattaattgtgttgttgtataggcgtggtttttataggtcgagtgttgggggatagagttgagttataaaaagaaggtgtcggaaattgtaacgtcgtagcgtcgtatcggtattattgtttgttttgtgaatatgttaatatgattagagggcgggcgggagttattggggagcgcgcgcgtatagagtcgtttttaggtggtttatcgagagatcgttgtagtttttgagttcgttcgttcgttttggtttagtttacgtttgaaatgttttagttatttagtcggggattgagggaggaggtagggttaaggaggaagggggagggagagagggagggagttagcgagtaggcgagtcgggcggggaaggcggagagcgcgttcgggcgtcgggtaggggcgttcgttttttttgtatttcgttcgttttttcgatcgtcgcggtcggttttttttttagttttttttttttttttcgtttcgggcgagtcgggcgggtggtcgagttttttcgcgagttgttattcggttattcggttttataaaagtcggcggtagtcgagaagcgagcgtcgagattttaggtttgcgtgttttttagttttacgtggagttaagtttcgttcggtcgtcgttgaagggttttcgagttcgggtgtttcggtgttggttttttttgcgtttgggttgggggagtataaggatgcggttatattttagtatacgtatgtgtgggttttttttttattgcgttttattcgtagttatgtgcgggtatttaaatattttcggtgtatttgtattcgaatacgcgttaatatattgggattgaaatatatatcgaaaaatacgtatatataaatacgtatatagtttgcgcg

SEQ ID NO: 11137 - DNA, 2548 bp, synthetic construct
  misc_feature 1..2548: note = Description of Artificial Sequence: Synthetic polynucleotide
  source 1..2548: mol_type = other DNA
tcgggtgggtttcgaaggcgaggatggttagaatatgtttttcgtgatattttttgtttttttttagggtcgtgcggcgagaggcgttcgagtattgttaatgtgacgcgggtttacggtcgtatcgtggggggtagcgcggcgtcgttcggggtttggttttggttggtgaggttgtagttcggcgggtagtttttgtgcggcggcgttttggtagcggttttttgggtgtttacggtagcgtattgttttgtagggtaagtaggatttttaggttttgtttagttggggttttcggcgttgggtttcgtatttgtcgggttgttcggcgggcgacgcgcgggaaaggtggtttttgttgttttttggcggcggtcggtttcgggtttttttattttaaggcgtcgcgttcgtttcgttaggatgttagttcggagggggtggtacggtcgggcgagttcgttttttttgggacgggattttttttcggttcgtttttcgtgtttttaggtggagaaagttcggtatgcgggcggaggggtagggttttcgaggggtttgcggggtgtgtttttgttttttttgcgttttagttgtcgttcgattcgtagcgtttcgaatgagtttttgtggattgtgacgttggtagaggggtttcggggggagtaagcggaggaggtgttagtgaatcgtattttgttttattttaaggtgagaaggtagtttttaggtttttaaggttgggtatcgtatttttattcgtgtttttttgattttgcgtcgtttttttttttttagtttgattcgcggattttttataacgatttggttttggtgtagttgtggacgtcggtgagttcggggggatcggcgcgtttcgtgtgtttgttttaggagttttaggagttttttgtcggaatcgtttgcgttatcgcgggttggggcgtttttttcgaaggtattgggcgtgggtgagtcggcgcgtggtgggaagaattgggggttcgaggtaatagagtgtagggaggtcgggttgttttggaaaaatgttgtttgtttttttaaagggggaggaattaaggggggtggtgggaaggggatttttaaggcggggtttttgttttttaaatttgagttttttattttttttttgtagacgggtttgaggttgaagtagtgagagaggttcgtgtttttttgtttagtatcgatatttgtcgaagagttttggggttcgggttgcgttttagtattatgttttgcgtcgggtatttggcggggggcgttgattcgtgttaggtatgaatttagtttgatgagaaaaggtcggttgagtttttttagggttattacggttttttttttttttacgtttgtttgttattcgatttttttgagtttttttgtttttatttttaaaatggatataagtggtaagtttatatttgttaggcgtaaggtaggcgttatagggggtaggtgaatgtagcgtttttttttttggtttcgtagggtgattcgggaggttttttgatttgttttgagtttggttttcgttttagagaggttttgttcggagttattttttggggggacggttgcggggagttagggaagttcggggtttatattcgcgtggtagtgtttaaggattggttttaggagtagatgagcggtgagcgttttttttttaatgtttcgtttttagtgttttaacggataatcgtgggataagttcgtttttattcggtttatgtttatttttagtttttttttgtttcgggaaagtttgttttttttcggggaaggagtgagggggttagggttttaaatagagggtgagttgatttttgtttcgttcgtagtagttttttttagtcgcgagtttagttgtagggagtttttggtttgggattttttttaggagttgtaggtagacgtcgttcggttttgcgttttttatgttcgtttgtgttcggggttttagggcgtttgtgcgcgtttggcgtattagtagtgtttgtagcgtcggcggcgatgcggttagttttgtttattcggattcggacggggggtagaggggagggggtttggttagtttttgatcgtcgtttcgatttttgttcggttcgtagagttgcgttcgttggcgtatacgttgttgggtttgttgcggaacgcgtaggagttgttcgggtttcgttcgggattgcggcgtttggttttcgttttggtttttttcgttttagcgtttagggagttttttttgtatttcgttcgggagttgcggttttatttaggtatttcgcgttttttagtttagtttagttttggttcggttttattcgcgcggtatagttatttttttcgtcgaggcggtattttaattttgtgtttttttaggatcgcgggttgtaggtattcggttttcgaagcggaggtcggagtcgcgcggagaagttaacggtaatgacgttttttgtcgatttttaggaggggataggttgagggtttggacgaggtcggaagcgtttttattgtagtttcg

SEQ ID NO: 11138 - DNA, 919 bp, synthetic construct
  misc_feature 1..919: note = Description of Artificial Sequence: Synthetic polynucleotide
  source 1..919: mol_type = other DNA
acgggagtcgttgtagggttaggacgtaaagatttcgaggttttttaggtcgaggggacgtcgttttcgttttatttttgcgttcggtaggtttttggtttcgttagtatttgtcgtttagggttggatttacgcggcgggcgggtgaggggtttttggcgcgcggttatcgttcgttttgtgttaggtgcggtgcggtagcgggagcgcgcggagttcgaattttgtacgtgtggtttcgtcgggtcggtcgttgcgagtttcgtttcggtttcggttatcgtcggggaggacgacgacgacgtggtgggggacgtgttggtattgttggtcgcgtttttggtttcggggtcgcgggcgtcgcgcgtggaggtcgtttttttttgtcgtttgcgtcgggacgcgttggtggagcggcgcgcgttgtacgagtttggcgtttattatttggtgagtgtcggcgcgcgggagggcgggtgagttcggtcgggcgggagtcggggtgattattcgtgtttttcgtagttcgacgtcgagggtgtttttcgtcgcggttcgggtttgaatttgattagcggttagtatagggcgttcgtggttggtttttacgttttcgtcgttacgttgtacgtgggtgaggttcggggcgtgggaggatcgttcgttttgtcgtttatttcgtcgttcgttcgtttgattacgttttattttttttcgtagcgttcggggagtcgtcgaggagggggtcgtcgcgttttcgggattatttgcgtttgtttatttgtatttagtttcggtgttagcgtaacgcgtgagtgtatttcggttcggattttatattcgtattcgttcggtttttataagttggaggtggttaaataggtattggacggggttttcgttcgtttatattttatcg

SEQ ID NO: 11139 - DNA, 2488 bp, synthetic construct
  misc_feature 1..2488: note = Description of Artificial Sequence: Synthetic polynucleotide
  source 1..2488: mol_type = other DNA
gcgtagttcggtaggggcggtcggattcgggtaaacgtagtttcgggtgggagtagggttatttttgttttcgagcggttggaataaaaatgcggattgtattttttttttttttttatttaaagtgtttagttttgaagataaggtggagggaggagagagagggcggaggtgtaaatttaatttaatttttgcgcgcgttttcgaggcggtcggttgttttcgtttcgtcgtgtttttttattaaggaaggttttttcgttaggggtcgttaacgttcgcggttttcggttagacggtgtatttgagagggatatttcgttttttttcgggagggattcgggtttgttgaagtgggtttaattttgtaaatcgcgttttaatttttcgcgtcgcgtcggggaatttttttttgatatttaacgtttttcgtttttatatttttaaatatagtttattttttttttcgtggcggtcgcggtaattcgagttcggttttcgtttcgtcgttagagaacgtttttttcgtcgggacgcggtgtcgagttcgttgtatatcgagcggtcgtggtataatatcgcggcgttgcgcgtataattatcgttttttaggattcgcggcgcgtatttcgggagtggggtgcgtttcgcgattttgggcgtttagggttagatatattttttgggcgtttcgcggtttttatagtgtagtttttatcgttttttttttattttcgggtatatttattcgtttttcgttttagtttattcggtttagggcgtagtcgttttttcgcgtttttttttttagtttcggtaaaggaagttttttttgcgtttttttttttagaatcgtttttagtttttcgtttttttaatcgtagtttaacggtcggcggtagtagtcggagaaggggggcggcggttcgggtttcggaaacggttcgatcgtcgggattcgggtcggatttcgtatttgggttggaagcgaggcggagatgggcggtcgggattcgcgagtgagcggggcgggcggcggtgatagttttatagttttagttgttgttgttgttgttgtcgtcgcggttgttcggggagaggggttggtattatcgcggcgcgttattgttcggttcgggggcgggggtggttaggaggagggtttaggcgagtagcggcggtagcggcggcggcgtcgcggttcggaggaagggggagggggtatcgggtacggggaggcgggagagggggcgggatcgggtacggggcgggggcgggggggaggggagcgtagggagggcgtaggtagggggagtaggaggagtagtaggaggaggtggcggaggggcgggtgagagggaggagtgggtacggggggaaggggagagaggaaaaggaggtatttagggagaggggagaggagaaaggagggagagaggcgcggggggagaagaggaggaaggagggggagttgggttaggtagggggggataagggcgcgttggacgcgtcgtcgtgcgtttcggtggggagcgcgtttttaagggggaagcgtttcgaggaagatttttgtacggggttgagttcggaaagaaggcgttgggatttgtgtttatttatcgttttcggaggttgcggtttttgggttcggtgggggttggggggagagggtattcggcgggttgtttgcggttaggttaggagagggagatttggtttaaataaagtgatttaggtatttttaggaattttcggcgttcggggttttttcgggtagttttcgatttttatgcgtttttcgggtttttagggacgcgggtatttgtggggcggggttgtcgggtttcggggttcggttttttcgggcggtcggagcgagatttcgggttgggaaagttaggtacgtggtcggttttcggtcgtattttcgttttatttttacggtagggtttttagtgtttgattaagtttaagttcgagtttttcggcgcgttgtttatcggttgttttttcgcgttttttttttttttttattcgtatcgtttcgttttttattttttttttgttttttttttattatttagtttatatttttttcgttttttttttcgttttttgcgggtattcgagtgttcgggaggcgtttatttgttcgatttaaatatttacgcgatttttagcgttcgtcgttcgcgtgttcgttttcgtttcgtcgtcggttattgtgtttcgttagtttatatcgggtcgggttttgacggcgcgcgagttatagttgtaaagtaataggataatttcggggacgtcgttttagtttagattcgggtacgtattgttcgtggagacggtatcgtcggggaggggagttacgcggattttagatgcggttttttaggcggatagatttttgttcggggcgtaggaggaggtaggattggtatcgcggggtgggagttttggattttcgagtaatttcggattcggttcg

SEQ ID NO: 11140 - DNA, 513 bp, synthetic construct
  misc_feature 1..513: note = Description of Artificial Sequence: Synthetic polynucleotide
  source 1..513: mol_type = other DNA
acgttgttacggtaacgattgtacgcgtatttttggagggtggtttgcggttttataggtttcgcgttcggggaggagaggaggtggtcgattagatcgtgggttttcgggtttttcggtttttttaggttttaaattttttttattagagattttgtttggagtttttatgttagcgtttttttttatcggtttttttttttacgtcggttttagtgtattacgcggttcggcgagggattgggaacgggatagggacgcgttttaatttatttagcggtggagttggggggcggcgcggttacgtgggatggcgggtagtttaggggattcgggcgacggggtttggcgggtagggttgttttagtcgtttttataaagtcggttttttcgatttttttttttttttgtagtttttttttttttttttgggggttgggaggggacggggcgggacgttggtagtcgggagagtggaaaaggttgtatagagtttcgtgataagttcggtcg

SEQ ID NO: 11141 - DNA, 1766 bp, synthetic construct
  misc_feature 1..1766: note = Description of Artificial Sequence: Synthetic polynucleotide
  source 1..1766: mol_type = other DNA
gcggatggtcggtttaggcgcgtttttttattcggggtcgtttgtgttcggtgtgtcgtgttcgcgggttaggggcgcggcgggaagttttcgttcgttcgttagttagcggggttaaataggttatttttttgcggacggtcggcgtcggagtttttttttcgttcgttcggatttattttcgtaagtagcgttggggttggagtcgggcggttcggattagtttcggtttatttgggcggcgttcgcggtcgggtttacgtcggggaaggtttcggtcgtcgcgagttttcgttcgagtttcgcgttttttagttatttatttgttttttacgttttatttattagcgcgtacggtttcggtaattttattcggagcggggcgtcgtcgtcgtttttgtcgtagttcggtcgggtcgttgggcgtaggggatttcgcgtcgtcgttgtcgttgtcgtcgtcgtcgtcgtcgttgtcgttgttgtatttttcggcgagcgttgttgtttttttttttgtttttttttcgttttttaacgtcgtcgttatcgttttcggtttttttttcgcgcgtcgttttagttaaagttcggtttcgtatttcgttcggatcgtttttaaatcgttttagttcggtcggttacgttgttttagttagttttttggtacggcgttatcgtttttcgttcgtttgttcgtcggtttttacgtaggggaggcgggcgcgtttcggggcggggagcgtcgggtcgggagtcgcggacggttggggttcggggcgcggggggtttagtcgcggtgtttttttcgagtttttcgcgcgttagcgtttttattttcggtttgggggacgcgcggttcgcgattcggttttgtttgttttcggcgtacggtttcggtttcggtttcgaagtttagtttcggacggggtagtgaacgtagagttggggtttcggcggttttcgatttttcgatgttttcggattcggttggtcgcgttttcggcgtcgagcgcgtattttcgtcgggatatatagacgtatatttattcgatatattttcgtttttgttcgttttcggcggagagttgaaatagatgtgggattcgtttaggagttggaaacgagggagggaagcgagttagagttttgtgtgtacgtgtgtgtgcgtaatatataaattagggggtatcgttaataaattaaatatcgtgataaatttaggagggttatcgattaggtttatttggttggaaacgacgtgaatttgtttttttttcgtttttttttttttttttttcggagttggagggagttaaatgtttcgcggggagtgcgatagtttcggtcgggcgtttttttcgtaatgatacgttaataaatgtttttttttatttgtttttataggattcgtttcggtttgtaaatattcgattgtttttgtcgaaagtttcgcgttcgtttttagttatatatatttgttattggagaggtcggcgtcggtcgcgattcgtagtttaatcgtagggtaaatcgagttgtttgtgcgcgttcgagaatttttcgagaaattaatttcggtttaagtgaaaatagtagttgttgtttagaaatggttcgggagtagtatagaaaggagaaatcggtttttttcgaaaggggaggaattggatttaagggggtgttgtttatcgtggttttcgttgtttttcgcgttatagaagaggtcggagggggatcggtttgacgcgggtgggtaaagagcg

SEQ ID NO: 11142 - DNA, 6511 bp, synthetic construct
  misc_feature 1..6511: note = Description of Artificial Sequence: Synthetic polynucleotide
  source 1..6511: mol_type = other DNA
gcgatttcgggggttagtagagaggagaggttgcgggaggattcgttgcgaagggcgaggggtggcgttgggtgggacgggcgtttggggtcgtgtagggtggtttttgggtgttgttcgggttgtttgtcgtttagtattggcgtaggaagacgggttcgcgtagcgtttggtaatagtggtttgttttacgtttggaggcgattaagttttgagttaaaggcgtcgggtttagtcgggaagtgtatggcgatttagaatacggagcggagaaggttttaggggatacgaggttatcgttttagttttcgggtttgcgtttcgagcggttagggtgcgtacggatgggtttcgggatgttagtggagaggtgataggagtttattattttacggttaagcgtgtgaggttttcggcgggcgggggtttttttcggggtagggtagggggagagttaggtatgtttttaacgggttttttagtagaatcgttaggaaagtggtttttaattttaggtatttttgtggtttttaggtagttgggcgattaaaaatttatttttgtttgttgtgaaatgggataggtggttgttaggttagagattgtgtttacgaagtttcgtttggcgggtcgggattgacgtggattcgggtttttttcggaagtttgggaatttgtgagttttttagtttttcgttttattttgtttgtttgaaaaaaggagttgtttgagaggaagagttaaggtttaaaaggttttaaacgaagagtatgcggtttgacgcggagcgtaaagaagcgagtagtgaattgaatttggtgggattgagattagaggcgtttgtatgcggcggtcgtttcgcgttttattaaagtaatttgttatttacgataattatttttgtaattattttggagtggttgtgatttgatgtttgtggtgttttagggtatgtttttattggatatagatattttagggtgttttttgacgttagtgtcggtttagtgggtgttagtgtcgcgaagggagggtggcgggcgtgaatgttttttttttttgggtttgtcgtaggtttcggtttttttattttgtttgattttggcgggtttgttatttattgaggtttttatcggcgtttacgttgtttcgagaggcgggataaacgttcggcgcgtggcgcggagtttgcgaaagcgttcgggggtttttattttttgttcgggagttttttttttggggcgggaagaggagtcgtagatttgttcgaattttgttttattcgtttggtcgttttttttcgtttggggtgggggtaggggtggcggatgatttaggtttggggtcgggagttttgtttttaaaggtattatttcgcgtttttttggaagtggcgcgttgttggggcgttttcgttgttgtagaggtttggtttgcggttttataggggcgtgggtttagggtttttagggagtaagtgagtttaggttttttagggggcggtagaggggaattttcgataattttttatttttttttttaggcggttgcgaggttttcggggttttagaggggtttttttttgtcggtgtcggttgttttgagcgcggttacgtagttcgcgtttttacgtgggtaaggggcggggacgttggagggaggttgttttggatgttggagttttcggttttcggttttgttgagtagaaaagttgaagttaaggaagggttgaggtttttttataagggcgcgcgcgtgtttgggtgtcggtttagaagtcgagaatgtgcgtattggggaagggtttttcgtgtcgagaagatagaggatttgttttagttgtttttcgtatagagggcgcggaggttgcgttttagttcgaacgtttatttattggaaagagggtagcgtcggggtttagggaagttttttgggaatgaatggtttttgttaagcggtttcggattttttgggttttttgggtttacggtacggtgttgcgcgagtttttagtgtttatcggtttttttcgttttttgcgtagacgtttttaggcggggaggtatatcggttttttcgggtagttttggttagtgttgttgtgggaaaggagagttagggtttgggatgggggatgagtatttttttgtttatttcgggttttagcgtgtaggaggtaaatttgttagtatagataagatagtttgtttaagttgtattttaggtcgggttagagaataaaatcgagggttagaaggtttagaatgtcggatagtttagcggtattcgttagggagttttaggcgttcgaaagaggcgtcgtatttttggcgagtttaggatttatttttttggatttgtgttttggagtgtttgcgggtttgggtttaatttttgtttttggtaggtgtttttttttttcgtcgttaatattaggagcgttgtttttgcggtaatttattttatttttagaagtttgttttgggatcgaagtgttagggttttgtgtgtttttttatgtattgttttttttagtgtaaagttttgtagatatgtttggtcgaaaagttttagtggttttaatttttagattttgttttcgcgttcggtcggaaaattatttgggatttggttgttgtttaaggtcgggggaaagttttttttggaggacgtttattattattatttttttttaggtttatttgggtttaaataaatgttaaagtttaaacgaattcgagaaggaatagcgaggtagtggatgtcgttatttcgtggatgggagagttatgtttattgtaggtgcggatatcgtattgataggtattgattattgtaaaatcgtatttagtattaaatagaaatagttttgttttttaatttttatagaatgtttaaatttagtttagggagttagttggggcgttttaataaatacgttttcgagaattagcgatgttttttttataatgaaagttaattgttgtataataattgggttaaagaatttcgttagtttaaattttaaaaattagtattgtattttgtttttaagtttgggtggtaagtatcgaaggggagagggaagtagcgtttgtgtggaaggaagtttcgttttttgtttaaatatgtgggatttgggtgtttatttttttagtcgagagttttttgtaggtttttttttaattttttgtatttttttatttttattttattcgtggcgttcgggttttatttttgttcggcgttttttttttagggcgagtagaggtttttgagtgatcggttcgttagaggtagttgtagagtcggcgtttcgtagggtagggtagggtcgggtcgttgggttggtttagtgcgcgcgggttttttttggttttagttagtcgcgggagatgttatttcgggcgatagcggcgagacgtcgttgttcgtaatttttgggcgggtaggatcgtttgttgtttttgcggtttttggggtagattttttaggagttttttttttttttttttcgttcgggggtcgggatcgcgttgtgtttacggagggaattgggcgtttttggcgtattggggttttagttgtatgattttagtttagattttaagttttagtggggtgtaggtgggatgggatgtgtttttaggagatgaggagatttcggttgttgagtcgttttttaaatgcgtagttttttaattttaggtgatattcgttttttggaggaacgagtgaaggtcgtttaggcgaaagaggggtgggttttagtatttggatttttttttttagttttgttaattttaggtgtgtttacggtggaggtgatagaaggaaggcgcgtcgggggatttaggtttcgtaggttttcggttgttaacgaggtatcgtttattgatttcgcgtttcgttttttatagcgtggggttcggcgttgcgttaggttcgggtgcggggcggagttaggttgggattggttgggggtcgtttcgttcggcgtttgggttttcgcgtcggttttcggggaggagttatgataattttttttttattaaggcgttcgggtttttcggttatcgttaggatatattgttcgggcgcggtttttttcgttcgcggagcggttttgatattcgcggcggtagtatttacgttcgtagagtcgtcgatgcgtgtttagtgattcggatagtaaggttcgcgcgcggcgggggcggcggtagacgtttggttatcgtgatttcgattttggatttatcgtttgggggttggggggattttggatttaattggcgattgttttgggggacgtcggacgttatgttgtggaaaataatcgataatgttaagtacgaagaggattgcgaggtgagttggggtttcggggtgtagtttcgtttcgtcgaggatagttcgggaggtaggggttattggatcgaggtcggggacgagggtataggagttttggtttttcggtgggacgggatttattttttcggatattttttagtttatttttgcggggttttttttttgtatagggtttttttttaaatagttttttttcgggaacgaggtttggaaagagaatggtaaattttatttatatagtttatcgggcgtttttttaagcggtaaatagttttgtttttcgttttttcggaaaagtgtttcgtttgtaatttttagacgtggtttttacgtacgaagtttttgtttaaaggggttagatgaggttatttgttagcgatattttggcggatatttttttaaggtcggtttgttatttgtttcgttattttttcggggaagtacgaaaataatcgaagtttggtttttaaaagaagtgggggttggggagtggtggtgggggtgttcgaggttagatggggtcgtaagagttcgcgagtgttttagtttgtcggataggttgagttagagtttcggagagtgggagggaagaaggaggcggcgagcgggaagaggaagaagacgtaggtagcgttaggcgagtttaggggcgtcgggagcgcggagttcgggttacggattcgcgggagtttattgcgttttcgggttttggagggttgtttttgttcgtaggttcgggcgttttcgttaggaggcgatagcgttatgtttttttaggttttcggcgtttcgagatttttgggtagatggggacgtattttttagaaattgagtcgggtcgtttaggggcgagggaacgtgcgcgggtaaggttgtttaatttttagggttttttatgttttttttgcgtttcgacgtgcgagaatattgtttttggtagtgtagggcgtttttatttattatttttttcggttgggttcggttagtagggagggtcgttttgtgcgcgcgttttttttttattttttagggcggcgtagggtggcgggttttgtttttcgagcgtcgttcgttcggaggtttttgtttcgagggcgtggaagggagggtttcgggggcgggggaggtgcgtatttttcgcgtcgcgtattttattcgcgtttgtcgcgttgttatttttagtagtttttgcgttatgggcgggttttacgagatagttttgtatcgggcgttcggttttttcgtttcgggttttggttttttcgtttcgggtttcggttacggatttttttggtttaagatttagggttcggatttggcgtttttaagcgtttcgggtttgggagtagcgtttagattttcgtcgtcgggttttgagaattcgtttttttaggttttttattagattttttttttttttcgtattttttgtttataacgaaattttcggggcgtattgttttcgggtatttttcgattttgggtaagtttcgtcgggcggggtgcggttggtttttcggggttttttgcgtagttcggcgatgtcggttagttcgtagtagcggggtttcgtattaacggggttttttgtttttttttttttttttaggatcgttacgacgggagtagtaatgggaattcgcgggttttttatttttttttcgtcgggtagtatttttatagtttcgcgttattttttttttatattggagtcgtcgaatattagtcgttattttattttttttttttttattagtagttggtttatttttagtcggtcgatttttattcgtatttgggggaagcgtacgtcgtcgttattaattttttgtattagtcggcgtttataggtagttagtagtaggtttggttcggtcgttagagttaggagggagcggggttgttttcgtattacgggcgttcggtcggtttattgttttattttttcgggttggaggcgggcgcggtgagcgttcgtagggatgtttatcgtcgtttcgatttgttgttgttttacgtatacgttttggatgtcgcgggtttggtcgagaatttggggttttacgatatgttttattagatggacgaggtgtaggtgagcggcgttgcggtttttgatcggatttgtttattttacg

SEQ ID NO: 11143 - DNA, 6511 bp, synthetic construct; identical to SEQ ID NO: 11142
  misc_feature 1..6511: note = Description of Artificial Sequence: Synthetic polynucleotide
  source 1..6511: mol_type = other DNA

SEQ ID NO: 11144 - DNA, 338 bp, synthetic construct
  misc_feature 1..338: note = Description of Artificial Sequence: Synthetic polynucleotide
  source 1..338: mol_type = other DNA
tcgtttttcgcgtatgcgtttaggtcggttcgtaggtttttttcgttttagtcggtagttagttcgttcgcgttggggttatcgcgagtcggttcgtagcggggttatcgcgattttcggcgtagatatagaggtcgtttttagtttcgtcgtttcgtggtttcgttttcgttgtacgtttttttatttttcggatttcgtagggtcgcggcggatacggttcgatcggggacgtgaacgcgtagaattatattttttagcgtttcgttcgcgttggaattatatttttcggggggttcggcggtgtattcgtcggggtcgcggattggaggttttcg

SEQ ID NO: 11145 - DNA, 936 bp, synthetic construct
  misc_feature 1..936: note = Description of Artificial Sequence: Synthetic polynucleotide
  source 1..936: mol_type = other DNA
gcgttttgttcgtttattgggtttttcgtcggtttatttgtatggttcgaggggggcggggttgacgtcgcgttgggaatgttttggtcgagatattgaggtagggtagagagcgtttgcgggcgtcgggcggagttgttgcggattaggattcgagtcgattttcgatttcgatttagattttaattcgcgttttcgtttcgtcgtcgtcgttatgtacgacgtagagcgcggttggagtttgtttttcgcgggttgcggttttttgggtttttattacgtcggggcgattcgttgtttgagcgagtacgtttcgtatttttttcgcgacgcgcgtatgttgttcggcgtttcggtcggggcgttgtattgcgtcggcgtttttttcggtatttcgttgggtgcgtttggggacgttgttcgggttttacgtgcggagtgggtgttttttaggtcggggagcgggggatttttaggggtcgcggggttttggaggagcgggtatcggacgcggatacggcggggtgtatttcgagggtttttttcgaggtagatgttttttgcgggggcgttgtttttgggttcgggaagggggcgttggaatttcgagcggttcgggtcgaagtttgggattttcgtgcgtttttatttttatttttattaggcgttcgtgtatgaagggagatttttattttcggattgagagtcggagcgtttcggagcgacggggagtagggagcgggattcggggcggagggtagtgttggtttttgcggatttcgggttttttgtgttttttcgggaggggttggacgggttgagttgtcgaggggtcgatttgttttgggtcggataaagagtggggttttggtcggttttttacggtgggttttttttttttggggattgagggatttaagatatttcgcgtttgcg

SEQ ID NO: 11146 - DNA, 2184 bp, synthetic construct
  misc_feature 1..2184: note = Description of Artificial Sequence: Synthetic polynucleotide
  source 1..2184: mol_type = other DNA
gcgcgtttttttaatttttttgcgttttagttttttcggttttagtattttcgtgatttgagtatcggcgggtttttgtttattgtttagtattcgacgtatttgttttcgtcgcgtagtttttttttttcggtttgagtttttttttcggcgcgtattgtttttgtgatttttttttttttcggttatagatgtagttttcggttagaagttttattttttcgaggttttcgtttttgttaggtagtttttttgcggcgtcgtttatttagagttttttttttggacgtttttttagtgtttttttagtagtttcggcggttttttttttatttttagtttttttttcggttttttaggaaggggttagattttagtttagtatttagcgttttttggttttttttttttgggcgttttttcgatagttttttttagggaagttggttcgttgcgcgtttttattttcggtcgtcgtttggatagaggcgcgtaattcggagggcgtaggtttcggttcggagaagggggtgtcgtcggcgtttcgattttttaggaatggggaaatagaggtacggtggattcggcggcggggttgggtttggggttggacgttgatttaggatttcgtttttgttcgttttgcgtcgcgtttttttcgggtcggttttgatcgagtagttttacgcgggttcggggttcgtttattcgataggagcggggggttgtagtttacgagtttacgagttcgtagcgacgtattcggagtgtaatttcgtagagttacggagatattttttcggtgtgggcgtttcgtcgcgtttttttttcgcgggttgcggttattttagggtaggatagagtcgagatgttcgggtgggagcgatgttcgcgtgggggcgatgtaacgggggagatgtttggggggagggtggtaaggtgaaatttggtggagaataatgggggtgggtgggcgatttttggggaggtgttcggtgtggggtgtttttggttcgttcggggatagtgcgcgttttttcgttcgcggcgttcgttttgttcgttttatcgaggtttttcgggagcgtttgggtttacggtttcggggggttttttcgagatttgggcgttgttttgggggagtaggggttcgggttattaaggttcgtgcggatcgtggggtgttttacgtttaggtcgggggattttagagtttcgttttttttaagggcgtcgcgtttcggattgtaggtggagacggggatcggtttcgcggggtcgtcgataggcgcggggcgggatagggtgggaggcggcggggcgtagagtttttcggtcgtcggcgcgattcgggtatttttttggaggcggcgggagcgcggtcgcggcgttttcggggtggggtttaggttggaggtttcggggcgtatcgttttagttttatttcggtcgggttttcgcgttgtttttgcggagagggaggaaggaaggaaggtagggagggaggggacggtcggtaggcgtggggttcgcggcgttagggtttttttttttcgttcgttttattttgtaattcgtagttcgggcggggtttcgttgtttttttttcgaatatagtcgtttttttttttttttttaatttcgagcgttttttttttcgaatgcgggagtttatagtgtacgggaagtttttttttttttttatcgaggttgttcgacgttttttttatttttcgatttttcgtaattattttttaaatgtttcggcggttagtagggttggggtgggcgtaggagaattaggggttttgttcgtatgtaggggtttggggtcggtgtggtcgaatgaacgcgcgggtttagacgagtttgtgatgttttcgttttttattttttcgcgatttggttttagaagatagtttgagaggtcggtggtcgcggattttggacgcgttttttttttgtttgtggtttttttttatttcggtagcgttgtgagtttattttttatttataggagttatatttagaatttttttttggggttatagcgtgggttttcgatatttgtgtgattttagttttgtttttttagggttgcgtggtgaagtttttaggatttttcgcgtgggttgggcgggtgacgtggatgagggataacgtggtgaggttttcgtcgtggcg

SEQ ID NO: 11147 - DNA, 413 bp, synthetic construct
  misc_feature 1..413: note = Description of Artificial Sequence: Synthetic polynucleotide
  source 1..413: mol_type = other DNA
tcggggcgtgggagttgcgttcgtttttttttttcggcgtttcgtggagatcgggaggtttagcgttttttttagtttttagcgtcgtttttttagattttagagacgtcggttagggcgcggcgtttcgggttattgcgggtttttttcgggcgggcgacgtggggggcgaggtatcgcgcggcggcgtttggcgggtattgttgttcgcggagggacggtgggggggttttagtagttggcgggggtggagggggcgggagagggagtttgcgtcgggttgagtttggaggtgcggggcgggttcggggagcgtttttggggttttttttgttatagtcggggcggttggaattttttttttttttttttttatttttttattttttttgttcggtttcgtcgttaggtcg

SEQ ID NO: 11148 - DNA, 403 bp, synthetic construct
  misc_feature 1..403: note = Description of Artificial Sequence: Synthetic polynucleotide
  source 1..403: mol_type = other DNA
tcgtttagtttttgcgttcggaagaaaatttagcgtaggtcgggtttcggcgcgcggaagttttgcgaattttaaatgtgtgcgttgagtcgaggtttttaagcggtaggagagaatttgattttcgatattttttttaagatacgcgtcggtggatcgggttttgggattggtttattttcgggttggattttggggttcgtatatttgaaagcgtaaatttgaggaatgacggcggggtgatgggtattttatagagtgggatttaatcgtgtttagtaatagatttttttaaatttttttttaaaaagagttttttagagttgtcgaaattttcgcggggtgaaagttaaatttttggagtcgttgtgtagtcgggtagaggatacggcggcgcgagtcg

SEQ ID NO: 11149 - DNA, 675 bp, synthetic construct
  misc_feature 1..675: note = Description of Artificial Sequence: Synthetic polynucleotide
  source 1..675: mol_type = other DNA
tcgtttttaaacgtacgattatttttttagttttttagtattaaatttagcggttttattcggttacgtttttacgttaggttatgatttttatatggtttattgcgtaagtttatatttagttttaggaagcgagttttacgtcgttttagttttgtatttatagtcgttaagcggtttcggaagtcgaatgtcggataggttaaagatagcgtcgttgtttcggtattgtcgttagagggcgcggagtcgtcgtgttggtttgtattttttttgttacgttagtcgaacggttacggtaatggaggattttgtcgtatgcgacgataggatgattgttttttttgaagttttattaaatacggagaggtttttttgtttttgggagacgcggtgatgtgacgtagcggttgtagcgaaggttttttgtaaaagatggtcgttgcggagttgttaggtgttttttggtaggcggcggtcgtattataagatggcggttcgttttagggttttatacgcggggttgcggaggcggcggtttcgagggttttcgttttttgttggttttgttttcgcgtgcggggttgcgatttgtttttgtgtgcgggtggaagtgcgggtcgttttggggtcgagttgtaatttcgcgatattttattggagtgcgatgagacg

SEQ ID NO: 11150 - DNA, 580 bp, synthetic construct
  misc_feature 1..580: note = Description of Artificial Sequence: Synthetic polynucleotide
  source 1..580: mol_type = other DNA
gcggtggtcgaggacgttttttttggcgttcgggggtatcggatcgcggttcgtcgggatggaggtaggtaggtagcgtttcgggagggttttagggagcggttcggagttgttcggcggggcgtttagggcgtagcgggtagcgtttatcgagggcgcgtaggtatttttcgaaattttcgttgattaatattttttagtatttagtgaagtcgattggtatttcggggagtgattggagttagttggttataagcgggcgggacggttggagattgtcgggatagcggttgtcggtgttacgcgggtggtgggcggttcggaaatgagcgtttttcggggatagggggttttgcggggcggcgatagttggatttttagcgcgtataaagtttgcgggaggatttattgtagcggtcgttttttttcgtttagcgagggcgggcgtaggggcgggggatgtcgaagggttaggtttgtttaggtcgcgttattttcgttttagacgtttagttcgttttttttataaaggaagaggagatcggagacgggacgtttgttttgttggtcgaatttttcg

SEQ ID NO: 11151 - DNA, 858 bp, synthetic construct
  misc_feature 1..858: note = Description of Artificial Sequence: Synthetic polynucleotide
  source 1..858: mol_type = other DNA
tcgggtacgttgagtttatcgagaattttaaggagttaacgagggcgggtgtttttatatttttttagggattagcgtcgttcgatcgtaattttggggaagatttcggcggttttggagaggagggataggtttttattatttatttggttagtttcgcggaagggttggtggatgaatgaattgttttttcgtcggtcgagtttcgcgggatagcggcggatcgcggggtgtttatttgtggggatgttcgagggttttttcgagttcgtatttagatagggattttaggggtggaggacgagcgttaggagtagtagttgaggttttatcgtgtatttttttatattcggttttcgagggtcgcgcgggtttaggcgtttacggtttcgtagcgtcgcgtttttcgcgagaacgtagagattcgggttcgttttgagtcgtcgattgcgggcgggagtcggcgggtaaggcgcgcggtcggtagtcggagcggcgcgtaacgtagttgagtgaggtcgtcggtggaggtacggagtagtaggcgttcggggcgttgcggaggttttataggtttttcgaggggaggcgacggggcgggtcgcgttttggttattggtcgtcggttgattcgtcgtcgttgcgcgttcggtgcggtcgttttagttcgtttttttgggttttacgtttggattgtttgtttagcgcggacgttatttaaggagttgtttgcggttacgtgtggaggtttacgtagcgtttttggttggaacggggaagtttgtatttagttttgggagtgggtttgggagagggaggaggagtcgtcgggagtttggcgggagggcggtgttttcg

SEQ ID NO: 11152 - DNA, 5715 bp, synthetic construct
  misc_feature 1..5715: note = Description of Artificial Sequence: Synthetic polynucleotide
  source 1..5715: mol_type = other DNA
tcgggattcggtttttcgtattcgtcgtcggtgttgtcgacgtttatagcgttgatgagattttcgaggtttcgggttcggttttaggagtttttgtttttcggttgaggaagcggcggcggcggcggttgcggttggggtggtagttcgggttttttttttacgtcgatggcgatgtagttgagattattttggaagtcggtagaggtttttttgcgtatgggcgatttatcgtttttaggataatcgattaagttttcgggttgattcggggtttacggtcggttttgcggtgttaaagggggcgtcggttgtaattgtcgtggggaggtgggcggttcgtcgttttttttagggtcgatatttacgtcgttttcgttgttttttttgagagagatattttttacggaggtcgagttgtggcgtttggggttgtgggcgaaggacggggatacgggggtgatcgtcgtggtggaggagaaggtttcggaattgtggcggcggcggtttttttgcgggtttgcgcggatgattttggcgtcgcggtgggggttcgggggttggttggtttgtaggaaggtttcgattttcgatatttgttttatgaggtttagtttttttacgttcgacgtcgggttggttacgcgggtagtttttggtttcgggggggtcgcgataggttgcggcggggtggcggttatattaaaagttatttcggtgtagttattattgttttcggtgttcgaggataacgatgaggcggcgttcgggttttgggcggtggtaacggtcgaggcggggggtaggcggtatagttttttcggggtcggcggcggtggcggcggttgtagagacgacgacggggacgcggacggacgcgggggtaacggcggatacggggaggaggtttcgggggataggaggtcgtttaaggagtttacggggtggtcgttcggggcgttcggtttaggagatttgggggagttgaagtcgaggtttatgtagtcggagagcggagatcgttgtcggttgtcgttgttggtgttcggggtgtttgagtttagcgacgaggtcgggttgttggcggataagagcgaggaggacgaggtcgtcgacgttagtaggggaggcgcgggcggcgataggcgggtttcgggttcgttaaagtcgatgttgatgtattcgtcggggtttttgggtttcggtggtagtgggtattcgtgtatgttgggtaggttgggtagtttttttagggataggcgcgtgggttttatcgttcggtcgcgttggtttaagaagtttttcgggcggtcgtcgttaggtcgtacgggcgaaggtattatagggtgagggggttgcgtggggtcggtttcgaaggcgttggtcgtttggttgggttttggcgtggtttgaggttttagacgttttttttttaggatgcgttttacgggggagtttatgagtacgtattggtcgttgttttcgttataggtgtagggggttttgtaggagcggggtaaggagttgtagtagtagtcgggaacgtttttgagcggtttttcgtcggggtgtagggttgcggagaagaagtcgggcggggtgttcgtggtgatcgcgtcgttgggggatacgttgaggtagttttcgttgggtagtagtttgttatttgtatgttttatggatagtttggaatcgtattatatgcgtatgtatttattgttttcgggggagttttcggcgggcgagttggttttgtagtcgttttcgttcgtcgggaatgttttgttcgtcgtagaggtgggtgttggtttcgtaggtttcgtagaaggtacggcggcggcggcggcggcggcggttttgggttgtaagatttgtttgggggcggatacgttggcggggtttatgggtatgtagtcgtcgtttttgtagttgtcgtttttattgttcgcgagggtcgcgtcgggcgttatgggtatgtagtcgtcgtttgtttttaggttgttgttggagtttttgtgggagtcgatttcgatgttttcgtagttttttgggtaggggtggtaggttattttgggagaggacgcggggtaggacgggtagaggcggttcgcgttgttcgagaaggtggttcgtattagggtgtatttatttagcgaggtagaggagggttggggtatcggtcgttgtcgggttggcgtggttagggagtaggtttttttgcgtagttttcggtttaggttttgggtcgcgtttttcgagattcggcggtaggagcggttatagtggtttaggggtttgtttatggttatgtattcgtagaatttatcgtcgtcgtcgtcgtttcgggtcgggggcgttttcgcgatggattcgggcgtgttgtttcggtggttgtagaaggcgcgtaggtcgtttgggttggagtcgtattcgtttagggatatgaagtcggggtcgttgggggagttcgaggcggaggcgttgtcgttggagggtcgttggtcggggtcgtggtgtagcggatgcggtagaggcgggtgcgggtcgggcggcggcgggtaggagttcgagtcgtggtcgttgttggacgatagggagtcggggttggtggcggcgggcggcgagtgcgttacgggtatggatatggagcggttgtgttgtagcgcgttttttgtcggtagtagcgttattttgttttcgcggtcgtcgtagtcgtcgtttagggtgtgcgagcggtttaggggcgcgcgtatcggttcggggtttagggggtttttagttatcgatatcggtttggcgttcgcggtcgtcgttttcgtcgtcgcgtcgtcgtcgttttcgttggcggtgcgtattcggtacgagttgtatttggtcgtcggcggggtggcggttaggttgtcggtgcgcgagcggcgtattaggttcgtttggttggggggtaggttgattaggtggtggtggcggcgcgcgtcggggacgttgatggggtgcgtggtcgacgatttcgacgattggtttttattgcgcggtcggaattcgaagagttttttgagcgtttttatggtttttaggatggtttcgtggatgttttgcgttattatcgagtcgttcgtttgtatttatagttcgtcggggtttgtgacggtcgagcggtttatttcgatgaagaagaagttgttcgagtggtcgtagcggcggatgtttatgagttgtagcgttatcgacggttgttcgtagttgagttttacgaagtcgatggtgcgcgtagataggtatagacggtatattttcgttaggtttttgttttggtttagatttttgggttttaggtttatttgttatattttacggtaggcggtcgtggcgggagttattagttcgtagttgttttcggtttcggcggcgtcggtagagtcgtttagggcgtcgggtagggaggcgttgtaggacgcggcgggcgcggcggcggggggcgcgttttcggcggtcgcgcggttttcgttgattaggtcggtgagcgcgcggtattagtttttttgtttttgttcgttttcggcggttacggcgaagtattcgtttttggtgtagagggcgattaggtatttgtgtttggcgtcggcgcgtttgttgatgtttaggtagtagtcgagagcgattattcgtttcggcgcgtttgttttgtttcgttattttttttcgttttcgtagtattcgagtcgcggcggttgcggcgtcgatttttcgttcgtcgtcgtttcgtcgtcgttcgcgtcgggttcgcgtagtacgaagaagcgtttgtggttatgtttttgtttgcgtaggtagtcgtatttgcgtacgttgtggttgttgttgttgttgttgttgttgaggttggggtcgttttcgttcgtcggttcgggcggttcgtgtcgcggcgggttcgttatcgcgggcgttttaggtcgcgcggttcgggttcggcgtttaggggttggggcgaggggcggagggggcgcgggcgggggcggtttttttttatttttgcgttcggtcgttcgttcgattacgcgtttttcgggtttaggcggtggggaaggttcggggaggttcgcgggggttagtatcgttcggcggcgtcgcgtttttcgcgttttggggtttttgaggatgttcggcgcgggcggtggtcgttttttttttcggttgtttgcggtcgttgttttttcgggttttcgggcggcgtcgggggacgcgttcgttgggtcgggagtcggggttttcgagtcgcggggtcgagtttaaggcgcgcgcggtcgtatcggggttgttgtcgtcgcgtcgcgtttcgggaagtcggggtgcgttcgggcgttcggggttcgcgtcgtcgtcggggttgttgttgttgttggtgttgttgttgttgttgttaacggcgattcgggttcgtcgcggttttcgtcgtatagtgagtaatatatcgcgtatcgagtgattgaattaagaagagtaaaataatatgtgattcggcgttacgtaggtatatatagcgcggtcgtttcgtttcgttgtttcgtattggcgtcgcgtttttcgacggacggcgcgttcggttaatcggcgcggcgttcgcgggggcgggtcgcgcgttttcgtttcgttttttttttttttcgggtcgcgtttttcgtcgttttttttttttttcgcgaaggtttcggttcggtcgggcggggtggggcggtttcggttttattaattagcggtttgttgtggatgtcggcggaggagatgttatttagggcgggaaaaggggcgcggaagaggggcggggcgggttacggcgcgtagggtttttttttttcgtttcggatttaattaattgggtttgagtttttgtcggggagggggcgtcgggcggggtcgcggttgggcggggcgggggatcgggatcggcggcgggggttgcggttttgtagtggaagtatgggcggcgagtcgggtcgtgttttcggggcgcggggtttttattttgggcgagggcggtcgttttcgcgttcggggtgggcgcgttttattttcgtttttcgtttttcgttttcgtttttcggtcgtattttcgttttttcgtagtcgcgaaacgcggggaggttttagggttcgcggtcgcgggttcgcgagtatcgcgttttagatcgagagcggcgcgcgttttttcgtggaggatagaggggcgcggagggggcgtttgtgttttattcgttcgcgggcgttttacggggcgttttttgcgttatttatttgttagtttgtcgggaagttgaaatcgcgtttgggaggtaataggagaaagagatcggggacggtaggcggagaaagtgcggtttttatagcgtcggggagagggcggattcgcgagttagcggtttttgagtcgggagatcgcgcgggcgtttttttagttttcgtaggagcgtcgtttttttttcgtaggggcgttttttttttttatcgttgtaggagtattttttttttttttcggaagcgtttttttattatatcgttttaagagtttttttttttttttataggggcgtttttttttttttcgaggtaggagcgttttttttttttttataggagcgttttttttattttaggagcgttttgcgtttagtagacgggtaggtgggcgggcgtttattatttgtgtgcgcggtgcgggcg

SEQ ID NO: 11153 - DNA, 858 bp, synthetic construct; identical to SEQ ID NO: 11151
  misc_feature 1..858: note = Description of Artificial Sequence: Synthetic polynucleotide
  source 1..858: mol_type = other DNA

SEQ ID NO: 11154 - DNA, 247 bp, synthetic construct
  misc_feature 1..247: note = Description of Artificial Sequence: Synthetic polynucleotide
  source 1..247: mol_type = other DNA
tcggaattttcggggaggattaacgtcggcgtatcgtgcggtcggggcggggcgtcgtttaaatttaggttttgtgatagcgattgtggcggtttggaaagcgtgggtttcggttattgggtacgagcggttacgtgatagcgggtttttttaggttagcgttggtggttgagtgatgtaattacgtggggtttgaagttttcgtgggtgtaggttttttcgttatgttgacgataggtagtgttcg

SEQ ID NO: 11155 - DNA, 224 bp, synthetic construct
  misc_feature 1..224: note = Description of Artificial Sequence: Synthetic polynucleotide
  source 1..224: mol_type = other DNA
acgttcgtttttttttcgggtagttttttttatttaggcgggatttgggttttcgttggatttagggtcgttttttcgtaggcggggtcggttcggcgcgtattttgtttcggatgttttggcgtacggtttcgcgtttcgtttttattttggcgtatttggttttgcgtttttttttcgtttggcgtagcgttttttgtcgtttttttttttttttggcggcg

SEQ ID NO: 11156 - DNA, 1174 bp, synthetic construct
  misc_feature 1..1174: note = Description of Artificial Sequence: Synthetic polynucleotide
  source 1..1174: mol_type = other DNA
gcggcgaattaaagagtagggaattataaaagacggtcggcggcgagtaggttggggtgacggggatttcgtggataacgggtttgaggacgtttagggttttagttttttttaggcgtttttcgtcggggtaacgtagagtagttgtcgtttttttcgcgttttagtagatggtggtgttagttcggtttcgtgttcggtcgtcgttgcgttcgcgtttttttttttcgtagatggtttaattagggttttcgttcgttttttcgcggttttcgtttcgcgcgtttgggcgagcgttgcgaacgtggagttaggtagttaagtgttattgcgtatagtaggtagtttggtaattgagagtataatatcgagtagatggtgttcgtacggcgtgatggatattatatacgatagtttgagataatttaggaattttttggtgattcgaggttttttttgtataaaatgagttttttttttattgtcgtgtatttttggggttatttgtttttttttttcgattgatattgaattggttttttattatcgattttttttttagtcggaggggaggaagaatttaagtgggggagggcgcgggaaggggacgtggagggaaacggaagggttgggagtggggtaggggggtagtggcgattttcggggggggagggtggcggatattagattttagggtcgatagttcgggagggatcgggttttaggattttagttgtataaagtcggttcggggagggggcgataaggagcgagtttcgggtcggttcggtatcgttgtttcggtttagagtttttgtaatcgtttggtttacgaataatttaaatgaaatttagggttttattgaaaaagttttttggggtttaatttagtttttcgattttagtttatatgtttataagtttttaggggatttcggttaggaagttaggagtggggttcgtgcgttttcggtaggatttagattgtttttcggcgtaggcggttttaataaagaagtttacgaggcggtttcgggcgcgggtaggggcggtgcggcggcgttcgggagattcgcgaggggttttggaggttttcggttcgcgcgcgtcgttcgggagttcgcgaggttgcggtgtgttttagcgggcgtattttttaggtttcgttatatcg

SEQ ID NO: 11157 - DNA, 8657 bp, synthetic construct
  misc_feature 1..8657: note = Description of Artificial Sequence: Synthetic polynucleotide
  source 1..8657: mol_type = other DNA
tcggattttttttcgggtttttcgggcgtttcgttttttcggggttggtttttttttttttttcgggcgtcgtcggtcgcgggtcgtttattttttttgggttcgtagtcgtcgttcggggatcggtagtgggattcgagcgggtgcgcgttcgttttgttcgcgtcgttggtcgtttttggcgcggtgtgtagggtttcgtcgggggtcgcggtcgtagagttgtatcgtaggagattttggttttgtagcgtcgcgtttaagttttcgtagtttgtgtagttgtcgtagaagggcgacgtgtagtagagggggcggtttagtagcggcgaggtagggtagggcgagttttttggcggtgtttcggttgaggtcggcgcggcggtcgcgggtagtttcggtggttcgtagttcgggtttaggttcggttgtttgaggttcgacgtggcgatttcggttagcgattatagtttgggtttgttggcggggggcggcgcgttcggagacgttcggttgttttggggcgttttgcggttatcgcggggcgcggtttcgggcggggggtttagtagcggcgtttttaagtcggtaagcggcgacgaggttacgggtttgggcggcgttaggtttcgttcgtttttttcgtcgtcgttttcgtcgttttttaggtcgttatatttgtttttgtatttcgagttcgattcgtatagggggttttcggcgcggtacggaagttttttttcgttcgattcggtcgagtacgagtgattcgtgagcgagtttacgtgtaggttgatttttgtgggggcgcgggtacggtgggtggtacgaggggatagcgtaggtatttggagtttttttcgttttttgttttgcggtattgggttttttttacgggattttttatttcgtttttattcggttacgtgataggcggagtttgattttttcgggaagggttcgaggaatcgttcgtttaaatttcggcgattttagggtaatgtggtgcggttggggtttcggttcggatttggggtgttcggcgggtaacgtttttttcgttttagttttgcgtttcgtttgggaagaaagcgtttcgagattttgcgtcggtcgttgttcgtttattttcgttttttgtcgaggttttcgtgtttttttgcgttttgtcgggattttcgtttttgtttttggtagcgtcgttttcgttttcgtttttattttcgtttttgtttttcggggtttaggttattttgtttttttttttgaggcgtcggcgcgcgttggcgaattaggtggagatttgggtgagggttattttggtgatgatggttagtatgattttttcgtttttggtggggtaggggtttttgcggtgttcgttgagttaggttttgagagtggtcgtggcgtttcgcgtggcgtttttgcggtacgcggggtcgttgagttggtacgggtaggtcgcgttgtcgtacgggtggtagttgatggcgtcggttatgtcggtggtgtgcgcgtcgtagggtgcgttttggaattaataagagtttgtgagtggagtatgcggagatttcgcgggtaattagttagaggatgttattttttcgttcgtttacggttatcgtttttttcgtgagtttggttttggggttgcgtttttcgtcgtaaaagagtaggaaaaacgtagtgtgattcgggattagttgttgattataaaaagtatcggagttttattttcgaatttttgaattattttatttttttaaaatgatttatttttttttaagtgtttcggagtcgttcgtggtaatgtatataaatttttgtacgtgcgcgtatataggtttataggtagttttttgatatttaaatttttgtagatgtttggagtgcggttgtttttttttatttttttttttttttttttatatggttaaaaaaatattttagagtttttaatttattatttattgttttaaagttgggtaaatttaatttgtaatttagaagttagttatcgtttcgaattttttaaatacgtcgtaattagtattttaatttattttttaacgtttaaattcgaggtatttgtagttttcgttaaggttttagcgattcggtcgttgtttagaaatttcgtcgagggtcggtagtcgcgataatttcgtaatggttttaatcgttcgtaacgtgtttcgtcgcggttcgggtttggtttagtttagtaatttcgagattcgcgagtcgtttttaggtcgtcggagtaggagttgcgttcgggttacggaggatttaggcggtttttagcgggttacgcgttcgtaagtacgatatttgaaagtatggttcgttggatagagtaaggtcgaaatttgggcgtttcgggtcggatttcggagtcgtagttgaatgttcggtttttgggtttaattcggtgatttttatcgttttgagtttcgcgagtgaatgcgaatcgttcggtcgtcggtttagaggtcgtagtgacgcggattttcgcgttttacgttaatgtaggcgagtatatagttcgtttcgaacgtttttttaggttgcggtgcggaaattagggataaacggcgttagatttcggtttcggcggagacgtattttttaggtttttagagaaaattagtcggcgagtcgaggggacgcgcggggggcgcgcgggtttcggtcgggtttagggacgttttcgtttgtcgcgttgttttttttattcggggttcggtttagtttgcggggcggttaatcgagtcggcgatttttgagtcgttagtcgcgttatattttcggcggttttcgttcgtcgaattcgagtttcgtttcgtttgagtttcgtttgggtttcggcgtttaggagtttcgcgtttcgttcgcgttcggttattatgtaggacgggaagtcggcggcggcggcggcggcgtcggtcgagtattgtagcgggttttcgaagtcggtggtcgtttgcgtcgtgaaggtcgtcgagttcgggtaggggttgaacgtcgagttcgacgtcgagcgcgttagtttttcgttgcgcggagtcgttaaagtcgacgcgtcgtaggtcgggtacgagtagagcgttagcgagtcgggcgtttggtataggtagttttgcgggtaggatatggtgggcgcggggcgcggggttcgcgttacgtcgagtagcgggtagggcgcgcggcgttttttatttacgttcggtcggggcgcggcgcggcggcgggtattcggacggtcggcggaggtaggtcggttcgggtattagtttgggcggttcgcgggtcggggcggcggcggggtggcggtggcggcggtagtagcgcggagtcggtgggcgtagtcgcgcgttaggtcggcggtcggggtttgggggagtttggagtcgggagtgaggagttgaggaaggagcgttcgagttttcgagggatattggaacgcgtagttgtttattacgcgtttatttgtatattcgggggttcgttttttttttgtttcgttcgttgtagttttcgggtcgcggttgggggaggggtagagagacgggagggaggcgggggagggcggaggcgacggaggcgggcggcgggagggatcggtaggtttttgtggcgtagtcgtttttttagtagtttcggttttagttcgcggttcgcggatttgtagtttagttcggtcgcgttgcgtgtttcggcgcgtattttttttatttttatttattcggagttacgttttttgttcggtttcggtcggtttttatcgttttcggttatcgttttcgtttttgttcggttttcgttttttttagttattatttcgtttttatttttttttttatttttatggattaggtagaggtcgttcgcggttaggttaggtcgggtttaattaggggatttatagtttgtttcgttgtgtatttcgaggaggttcggtttttgtgtttaattcggaagtcgtagggaagtggggaggttaggatggtggcgttcgcggttcgggttttttttcgggtagtgcgcgcggtttttatttttacggtttcggatttgttttgttttttggttcgaggtttttcgcgtggtttcgcgtttggtcgtttatttttcgcggtttatttcgtttagtatggatttggattcggggcgttttggttgcgaattgttaggagggttttgaggtgagttttttgtttttaaattcgtagcgtaattttcggggttttgaacgttacgattttttattgttgggaatgacgttagggttttagttaagaagacgtcgttttttaaagagttttattttattttgtttttttaagttgattttttttttagatttgtgttgttaaaatattggggggatgattgttatttgataaatcgtttttggtaggatttgaagttttttagttacgtcgagaacgggtaggagtttaggttggcgtcgtcggtgtagtgggtattataggtagtttaggtgacgcgcggttggagtaggggggcggttgttttgcggggtttagaagcgaggcggttggcgagggtttttaggattttagttttttagaattttttttttattacgtttttttaatttttttttattcggggatggtcgaagagggcgtttggttgtttatttcgaagggttatttatggggggcgtttagggggatggaagagtgttaggtttgtgttggtttattgggagtatttatttagtaggtgtttttattttcggaagtcgtttcgggtgggtgcggtggagaagagagagcgtagtggtttggggcgggttttagtttaggtttgtagtcgatttttgtatttttgttggttttgtagtttgcggagtagttttagtgattttaggacgtagggtatgttgcggtttttttgtggtgcggttgtagcggcgcggagggagcggagttcgggttgttagtttggtttagggcgtaagagaaatatttacggtattaggttgtttttttttaggtgtaagggaattagttgtaaattgtagtgttgtgtttgaggatggttttttttgagtcggtaggttttcggtaggcgcggtttaggtacgttatttttttcgttaggagttttcgagtcgagttattcgttttttattagttattttatttattttttcgtttatattgtttttttattattttttttataaattatatttttattttgtatatattttttttaggttattttaatatacgtatacgtatatatatttacgattatttttttttttatttatagatatttcgtttttataggttgggttttttgtaacgatttagcggggggttttaattttgttgcgattttatatgggatattttaatttagtttaggatagatatttttaattaattattatagagttgaaaaatagagagagagagaaagtagtcgggttgggtaagtcgtcgatagtttgcgatatttttgcgttttttgggagggaatttttttaagaagaggggtaaatgagaggtttatacgttggatggtaaatataaatattgttagattagatggtaatttttagggtttttttacgattagattagtttaaatgaaaaaaaaatcgggtgtaatttttattattagggagtattggtttggagtatttttatttttaaagagcggttttcgttgtggttttattagtatttggggtttatttttttttttttttttttgatttattttttttttttcgtcggatttttgttaggggtagaagagaaaatagttagttattatataaatatttttagtttggagttggagtgtttgttttggatatagtcgattttgatattaattaaatatataattagatacgtgtagtggcggggagggtttttttatttagggtgtatttttagaaacgtcgtttgtttttttttttttttagtttagtgttgggagtttgaagatggttttttttcgttttgtgtgtattttttttttagtaattatatttttttattgaaatttatatgttttatatcgttgttgtttgttattaataaaaatcgtttattttgtattattaaatagtcgatttttattatatgtcgtttttattggtagtgattgtagtaaattaaaatgtttacgtagggatattaaaaatttaatattcgttattgttattgaaatatataaattacgttttgttttaaagttttttgatattaaagaaaaaaattatattttttttttttaagttaaagttggtttggttttttttttaaaaaaaaaaaaaattaattatgagaaaatatgttgttagcgtggagttttggcgcggcggtttcggcgaggttgtttgagagggtggcgggtttagtttagatttcgtttcggggttacgagggttgtaaggtcgcggttttcgaagaggagggtttgggatgttttgtttaagggcgaggcggggtgtttaggtttgtggggtcgttggggagagttcggtatttggtttttgaggttttttagttgtcgttcgagtaggagggagggaatgagtaggtacgtagggaaaatttagtaattgttttgtaaacgcgatttttggttataataatttaggcgatgggggtagttttaggtttttggtgggttttgtttttttttttaggtgtgttttaggaggtggggaaaaaattaatattgtttttatttttttttattgtttttgtaatagttaaagaatttagaacgagtttacgtggatacgtaagttttagcgagcggggattttttgcgaggtcgagcgcgaggaatagtcggtttcggaggttcgggttcggggttttttcggggacgcggtcgattgagaaggtcggggcgttcgtcgggcgcggcgtcgtttttcgtgtcgcggggacggaaggaggcgacgtaggttaggagtcgtgcgcgcgggcggcgagggggcgttgtggttcgtgtttgtcggttcgagtttcggtaacggtgggcgcgatttattttttttttcggcggtttaattcggggaagaagaaaaaacggtatcgaggtattttaataaaatttaagcgatttttgatttttttttattgtggttttttatgagttttcggtgtttggcggggaaatagttatcgttcgggggtgtggtaaatttttttggtaattaagatgaaatagacgtttttatgtgggttttttttaatgaagtaatattggaaatgtaagtagttttagtgtattaaattatatcgttatcgtattcgcggttatcggttttttcgttttagggtttttcgcgtttgtcgagggagagagcgaggtaggaatagggggtcggggatatgagaagtttggttaagaaattttttttttttttgaaaataaaagcgttgttataaatggaataaaatttaagttaatatggaatttatattttttttaaacgtcgtttttaggtttagtattttgtgagtaggttggattggattttacgtttaatcggtatttttaggtttttaaagacgttttcgaggtttaaatgtttttttggaaaatacgtgtagaggagtattcgtggaagattgaaaggttttcgtagttttagttttggtaggatgtgtaaggtttttcgaggtttttaaatgggttttcgaggtttgggagattttcgagtagttacgcgggcgttattttagggacgcggggcggcggttattgtgggtcgggagggttttcgtacgggttgttttgagcgtttggattcgggattttgcgcgcgtttttttttttttttttcgttttttttttttttatttataatttatattttagggatttcgtatttagttaattagtttttgtttatttaattgttttgtttttagtttcggatttttgggaggtttttttatggttaatttgtttttttcggtattttttagcgttttgtaaaatttgttttttttttatagatgtttcgttttcgacgtgttttttgaagtttttttttcgtttagggtgtttataattttgaattttttagtatttcgtcgatttcgtttttattttttttttttttttaatttcgcgttggtttcgttttttttttttttttttttttttttacgcgtttcgttttttttttttaggtcgtattttttttcgttcgggtcgggagtttttcgtggttaggcgttcgcgcggtttaagatcgaggttcgttacgttgggtcgttcgtgggcggtttttattcggtatatcgtggaaacggcgcgtttcgttagttgcggttttagtttgggagggagcgtagcgcggggagtttgtagcgtttggagagtgaggaaaagggatattttttggaaatggatagagtcgagttttttaaagggatcgtagttgaaagagattttttttaaaattagtaacgatttggtagttttagttttttaataggagatggttcgaagatgaaatgtttgaaatttcgtcgtcgttttatttttgtatatacgcgtacggtaggtttagattcgtatagagacgtagatacgcgcgcgttcgcgtttttcggagaggtcggcgcgtttcg

SEQ ID NO: 11158 - DNA, 1059 bp, synthetic construct
  misc_feature 1..1059: note = Description of Artificial Sequence: Synthetic polynucleotide
  source 1..1059: mol_type = other DNA
tcggtttgttatcgttttttagggaacgagatattgttgagttggaagatttcgcgggttataggtatagtttttttgttgttggcggcgttgttggggttgtttggtaacggtttcgtggtgtggagtttggcgggttggcggtttgtacgggggcgatcgttggcggttacgtttgtgttgtatttggcgttggtcgacggcgcggtgttgttgtttacgtcgttttttgtggtttttttgattcggtaggtttggtcgttgggttaggcgggttgtaaggcggtgtattacgtgtgcgcgtttagtatgtacgttagcgtgttgtttatcggtttgtttagtttgtagcgttgtttcgtagttattcgtttttttttggcgtttcggttgcgtagttcggttttggttcgtcgtttgttgttggcggtttggttggtcgttttgttgttcgtcgtttcggtcgtcgtttatcgttatttgtggagggatcgcgtatgttagttgtgttattcgtcgtcggtttacgtcgtcgtttatttgagtttggagattttgatcgttttcgtgttttttttcgggttgatgttcggttgttatagcgtgacgttggtacggttgcggggcgttcgttggggtttcgggcggtacggggcgcgggtgggtcggttggtgagcgttatcgtgtttgttttcggtttgttttgggttttttattacgtagttaattttttgtaggcggtcgtagcgttggttttatcggaaggggttttggcgaagttgggcggagtcggttaggcggcgcgagcgggaattacggttttggttttttttagttttagcgttaattcggtgttttacgtttttatcgttggagatttgttgtttcgggtaggttttcgtttttttacgcggtttttcgaaggttttggggaggttcgagggggcggtcgttttagggaagggattatggagtttcgaattattttttagttgaaagtggtggggtagggtcgcggtaatggagattcggggggtgggatggagaaggacggttcg

SEQ ID NO: 11159 - DNA, 1663 bp, synthetic construct
  misc_feature 1..1663: note = Description of Artificial Sequence: Synthetic polynucleotide
  source 1..1663: mol_type = other DNA
tcgtttttcggttttcgtttttcgtttttcgggtggtgaacgtttgaagagggaggcgtggtttcgcgtattttgttttcggtcgcgttatcggtatttatttggttgttgtcgtgtttttcgttcgttttcggggttcgagatttcgcgggatttcgcgtcggttttgcgggaggaggcggcggttttagtagttgttttaggtaggcggtgttcggtagagaggagtttttttggtggtataagtgcgtttcggggttttgacgtcgtgtatttttatttcgggcgcggttttttttcgggggaggttggggtgaggaggatagggaggatgaggcggaggaagaggaaggagttgagtcgggggagcgttcgttaggaggcgtttttttcgttgttttcgaggtcgtcgcgggtttttttacggcggggagtaaatgttcgcggattcggcggcgtagcgtggatttttgttcggttttgtcggcgtcgtcgggttttaggggtttcggcgacgagtagtataggttgggttgcgaggaggagaagattcggtttagtatttgttttcgttttttgaagtcgttttatttgttgtttgtattattttttttggtcggtgtattttttgtgtttatcgggggtggcggggagggcgacggggtgttcgtagtgcggcgttttggatttttagcgcgttcgttttcgtcgtttttgtttttgtttatttttagttgtaggtttttttagagtcgggtttggaaggaggaggacgtcgtcggcggttttggttcgttcgtcgcggtagttcggggttttattttttattttttgttttttttttttttttttttttttttttttttttttgtttttttttttttttcggttgtattttttttcgggtttttgcggcgttggcggtggcggcggcggcggcggcgggcgtagtagtagaaatcgggagtgtttagcgattttaggttagttcgggggaaagaagcggtcgtcgtcgtcgaggttttttggtttcgggatttcggcgttgtttttttttttcgtatttgttggggtgggttggagtcgtaatcgaatttcggtcgcggcgtttgtaaagtttttttttcgaagtttcgcggttttagtttattggcgttttttaggtcgcgttttggtttttttttttttttgatcgagttcgggaagttgtacgtatcggggcgtgcgcgtttagttgcgttagggatcgtattcggcgttttttgggtagtatttgttagcggcgggggcggttgtttttaaattgggcgcgtacgcggtttatataataaggcgcgtttggttggagatttcggggattagtagtttttttggggcgtttcgggattattttttagtttttaggtgggagggtcggtaggagtcgggtggagttaggtagggttcgaagttagtttgttttttaggattcggttatagttgtttaggtagttcgttgtgcgttggtcgttggtcgcgttggcgatcgtttgggtcggatgaagcgagttggagtggaaattatgtgttttcgatgggtttcgtgggggcgtcgatcgtttatattgagcgatgaattcgacggagttttaaagttgaagacgtttgttttcgtttcgttgcg

SEQ ID NO: 11160 - DNA, 2065 bp, synthetic construct
  misc_feature 1..2065: note = Description of Artificial Sequence: Synthetic polynucleotide
  source 1..2065: mol_type = other DNA
gcggatcgcggcgtttttagggaatatatttatttagtaatcgagattagagttggagcgttgcgtttttaattttggggcgggcggggggcggcgggaatttttgtttcggttttttttgtatcgcgggggtagttgttatttgtaaggcgagcgcggcgcgggggatggaagtaggcgtttattggatagaatataaaggtagaaatttatttcgaaggtcggggttcggcggggcgttgggggtgggcgtttttcgcggttttcggcgtttttcgtttcgagacgtttcggtttagcggtattggcgcgatcgaggtttagtttcggggatacgttcggttggtcgcggggaaggtattaggtgagcgcggtcgcgtttttcggaatttcgttttcgcgcgtttcgcggcgacgcggcgtttattcgtttcgggagttaggaatttagggttttattatggcgttggtcgtcgtcgtcgtcgttgcggttgtcggggtgagttaggcggcggtgttgggttttttgtaggagtacggcgggaaggtgcgtaatttcgagttgttgagtcgttttaagtcgttgttcgatgtcggcgattcgcggggtcgcgtcgttcgtagggatcgttttaagtagttcgttaataacgtggcggtggtgaaggagttcgacggcgttaagttcgtggtgttgaggaagaagtttcggttttcggagttcgagttcgtatttttcggtttttcgggggtagcggtttagtcgtcgaaatttatttcgacggttttgtcgcggagcgtttttgtttcgggagtttcgtttttggttcgggtgtcgcggttagtggagtcgttaggggatttgggtttgttaatagagttataggatatttcgggggggtcggttttcgagttcgtttagtcgttcggggagcggttcgtcgatttatcgtttttagtttttgagttagtttaggttatcgagagatttttcgtagacgcggttttatcgtttagggttttttttgaggcggtatcgttttgttttgattcgttagacgcggagttcgggttcggggtagcgaaagggtcgtcgtagtagaagttttgtatgttgtcggtgcgttgcgtttcggttttcgttacgtttcgttttcgggcggaggagttcggtttgcgtcggtagttgtcggaggagtcgagttcgcggagtttttttttgttgttgaggcggttttcggtggaagagttcggtttgggtttcggtttgggttcgggtcgtttttcgtatttgaggcgtttgtcgcgcgtcggttcgcgtttgttgagttttgacgtcgaggagttgttcgtcgcgtcgtcgtcgttcgcggtgtttttggagtcgttcgagtacgagtggttcgtgcggattgtcgggggtcgttggatttattagttgtacgggttgttgttgcgcgatcgcggtttggcggttaagcgcgattttatgtttggttttacggttttgtattgggtcgttaagagcggcgacggcgagatggcgttgtagttggtggaggtcgcgcggcgtagtggcgtattagtcgacgtgaacgtacgtttttacggcggttatacgtcgttgtatttggttgtattgtacggttacgaggacgttgtcgtgttgttggtggtgcgtttgggtgtttaggtgtacgtgcgtgattatagcgggcgtcgcgtttattagtatttgcggttcggtttttcgtacgcgttgcgtcgtttttttggcgatttaggtttgcgaggtattacggagttagatgcgatcggtggtggaagtggtagttttgttgttaggcgtttcgtataggtggtcgttattatttttagttttattattagtgtatttttgggcgttttggttgacgattttatgttttaggatttggttcgaggtttgaagaagtcgagtttttttagtaagtttttgagcgtttcgtttatggttttacgtaaaaagataaagattcgcggtggtttgttagtttttttagaaatttttcgtcgatttatttcg

SEQ ID NO: 11161 - DNA, 3487 bp, synthetic construct
  misc_feature 1..3487: note = Description of Artificial Sequence: Synthetic polynucleotide
  source 1..3487: mol_type = other DNA
tcgagagaaggtgagttcggcgggcgtagcgggttgggtgggtgtggttcgcggtttcgggaatagatttaaggtttcgttatcgtcggttagtagttcgatagttcgttcgtttggcgagcgtaggttttttttttagaaattgcgaggattcgagcgtattgtttgtgtattataaggttaagtcgggaagtggagtcggaggaggaggggcgaggaggcgaagggtggggagaggggcgtttcgttttttcgttatgtgttagtttttggaagttatttttcggtttttaatttttcggggtaatgggaaggaagagtaaggaggaaggggtcgtttcggggtaaaattttgttggggttaggatgtgtaattatttatttattcgtttattattgttttttttatttttcggaaatgcggggtagcgttaggcgttaggaggtattcgggaggggggagggggcgacgagtttaatggggattttttttacggatcgtttttttttttttgaggtcgtttataattttaagttttttcgttcggaatgttagttttttatttggagtgggtgcggggaggagggtcgcgttttttttttaagattcgcgttcgtttttttattttttttttgttagtattttttgtttatttttggtgttgtaaaacgttacgtaatttattcgattcgtattttaaaattagcgatttagaagtagggtttagggcgagggttttttagcgttggagtttcggggggcggggtgtttagtgtaaatttcgtttttttcgcgagtgtcgtttttaggttgttatttgtaaagaaacgtttttttgacgtagggagaaatggtaaattttaagtacgttattaatatggcgttaaaagatttttttaagtataagttcgtttttttttttttttaaggttgcggggggcgtcgttcgggtttggggcgcgtagggggcggggtgtgagtagaaagtgtgagtgaaagagtggaggggcggggtatgtgtgtgagtgtgtgaagtgtgagtagatttgatgggatttgtacgggcgtagtcgtcgttcgggttcggttttggggatagggcgggttaggggcgttttagagtttatggggagttcgggtttagggtgttagtaggcgtggtggtggggttgcgagggagggtattttttttttacggggttcgtaacgttatttggatttttcgtcggagttaaataattgggcggggggttgggggggcggcgacgggggtgtcgggagcggagattcgagtgaataagaaaaaagtggttattttttttttttcgttttttttgttcgtttttattttatttttattttaatatattttttttttttaaagagattataaggaagttttggtttaaaaagaaatagaaatatatatagggggttggtgaatggtgtcgatcgcggttatcgtagttggaggttattttttggggggggtgagtagcgtttatggagttattttgcgtttatttttagcggtatcggtttaggttttgcgggtcgatcgttttcggcggggggcgtggggtttgggacgtcgcgggttcggtcgtttttttcgtcgcgatttcggatggatgcgcgtttttcgttttttcgcgtcggttttaggagttttcggtttcgggagtatttttttcgcgtcggtttttgtagcggcgcgtagtcgagggtagcgttcgttaggggggtatcgcggagtaaggtaagatttagttttcggcggatgggttttgcgtatttttacgacgttatttggcgtttttgtaatagatttgttagcgtttttcgttttttcgtttttttttgttcgttcgtttttttttttttttgttggttgtttgttttaggaagttagcgcggagaggggggggatgtatagtataggggagagagattgcgtatgttggttagtcgtgttttaaagagtatagtgcggggaggttgagaggggcgtatgtaataataatttttggaagggtgagtttggcgattttttttattaatgattgcggtaaagcgttttcgggtcggcgagggggcgcgggcgggcgggggcgcgttagggttgtaattttttcgcgggtttcggtcgggcgtaggggttgcggcgggagatgggtacggtggggaggtcgagcggttcgggcgggggtttcgagaatttggagttatttgtttttttgttttttcgagttttattttgttgatacgtagtacgttcgggcgtcgaatcgggttgagtcggtgtatatgatttcgcgttgggtttacgtgtagtcggttcggttttagatatttttcgggggttatcgttttcgttttgtcgttttttttttcggttcggtgtacgcgggcgttgtacgcgggggtagtatgttcggtttttggggttggaggttttgtataaattagatagtttttttggaggggcgggggatattttttttaggtgagtgtggagggtgcggagtttcggcgttaggggtgaggattggggtcgggggtagtttttattttcggggtcgcgcggtagtttagttggggagaggcgttgggagagtggaaatgtatcggcggcggtcggagcggcgggtgcgcgttcgcggggcgacggtagggggcgtggtttttgtttatttttttttaattttgtcggttcgcgtttcgttttagggacggattcgtagtttttagttttttgtttagggttttgtattatgggtggtattaggaagatgtcggtttgtggcggatttcgtttgggacgtatatatttgatttttaaatgagtgatattgtagttttcgtttttatttagcgttgttgtagtttttttgtcggattttcggtttcgtttcgttttcggtagtggtattttttcggttttatttttttttttttttttttttttttttttttatttattcgtttgcgtttgcggagcggcgttcgttcgtttttttttcgtttgggtgtagatttgtggttttttatggttttttttcgtttatttttgggttttgagatatttttttttttcggttaagggacgagaggggttaatttggcgattcgtagttgttttgttagaggatggggttgtttgcgagatagttaggaaggttttattttagtttttagaggtttagttttgttttttattatatatagttattattttattcgtttttggggttcggttgtttttttcggtgttttttaaatttttttttcgatttgggtgttaagtttatttatttttcggcgtcgttttcggtcgaatagttttttgtttttttttcgtttgggtcggagtttttcgtagtttttttcggttttttttttcggtttcggcggtcggaattacgtcggcgcgtttttagtttgcggtttcgcggattgtttttaggggcgggttggaggcgcgcg

SEQ ID NO: 11162 - DNA, 847 bp, synthetic construct
  misc_feature 1..847: note = Description of Artificial Sequence: Synthetic polynucleotide
  source 1..847: mol_type = other DNA
tcgaggggaaaggacggatttggcgtttggggttttttcggtgggatttaggtgggtggttcgcgtggggtggggtaggggtatttataggcgtttagcgttgcgggggatgtttcgaggaatcgcgcggaggtttagttcgtggtagtttacgttggtagcggagtaggtatatttggtggggtaggcgacggttggaggtttatttaggacgttcgttagcgttaaggttagcgttaggcgggcgcgtacggcggcgtcgatttttgtttattcgggggttatggtgtgtagggtttcgtttttggaggaggttgtttttgcggggtaagacgcgtggagttcgaggaggcgcgcggggagcgcgggcggtttggggagcgggcggcggagttagcgcggaggaggggcgagttcggtgtttaggcgtacggggcgcgggcggagcggggcgtttcgggcggcggcggcggtagtaatagtagttttatcggcggggtcggcgttgtttcgttgcgtatcgttgggagtgtttaggtgcggagcgttttttggtttcgttggttcgcgggtcgggttggggatttggggcgagcgtaatggggcgtggcgttcggggaggttcggtttggggttgggttggggagcgcggcggttgcggttggggtacggggcggtcgggtgagttggtcggcgttcgttttttttatttagtgagtacggtagatatcggagacgcggggtttattttttcggttttttttcgattaagaaacgttaatttcgttttttattggttgcgtcgcgcgttatgtcgattaagttgggaattttgttggagcgatcg

SEQ ID NO: 11163 - DNA, 909 bp, synthetic construct
  misc_feature 1..909: note = Description of Artificial Sequence: Synthetic polynucleotide
  source 1..909: mol_type = other DNA
tcgtttagtatagacggggtattttcggtgcggtttgttatcgttttgtttggcgttggcgtttttagagaaggttatgtcgattttttttttatttcgttttagatttttttttttgagttgttttttttatagtttttttaggcgttattgagagtttttcgttttcgatgggtttggggcgtttggattttttcggggttattttgtcgtttttttttagtttttttttttattttttgtcgtcgttttttcgtttttttaggattttgcgtatttaggttggttttatgttttggggtattttagtagtgttttcgggttttcggttattcggtgacggagggagggagaggttggcgagggggcggcgttttaggttttagcgcgattcgttttttagtttttttcgtcggttatagtcgcgcgggacggggtagggatttcgagaatatcggggatttgcgggtcggtggtttcgggtaggttatttttgacgcgggtgcgaggtttttcgcgggcgtgtacggttgggtcggagtcgcgtcgggggtcgggatacgtttggggttagcgttggcgtcgtcgttcgggtggggtgggtcgggttcgggtttagttttttttttacgggcggttcgcgtttcgttttttagtgatttttatattttttgcgtttcgagttggaatttcggtaggttttgtttcgggtcgcgcgcgttttttggggattagggttgtggtttttgtttcgcgtcgtgtttttagatatcgtcgggcgttcgttttttatttttttttttttttttttatttcgcggttgacgagggtcgtttttaagtggttatgtttttcggtatggacgattttttagtgtttttgagggtttagggtttcgttttcgtttcg

SEQ ID NO: 11164 - DNA, 2150 bp, synthetic construct
  misc_feature 1..2150: note = Description of Artificial Sequence: Synthetic polynucleotide
  source 1..2150: mol_type = other DNA
acgtcgcgtttcgtcgttcgcgggttcgtcgggagattgcgggttcgtttcgcgggtggggcgtttcggtttttttcgttttttggaggttataggttacggcgacggcggtgatcgggagagtaggttgcgaggcgcgttttatcgggttatagataaattatttcggtagcggtcgcgtcggaattttttttaagttattaaattcgtttacgcgcgggagagtgttggggatgttttatgcgttcgcgattttagaagttaggagtgtgttatttttttatatatttattttcggttttgtacgtttttttttacggttcgagtttttgtaaatgtttggttagatcgaggtcgtcgagatgttcgttttagttttttttttcgtgggtatttagggtagttcgtgagcgtcgttcgtcgtcgtttttagcggcgtcgggttttcgaatattcgtcgggtgagcgaagtatagcggggttacggagcgtttcgacgcggggacggggagggtagtgttttttttataaattagttttttgggtgaagtttttggggtttggagattggagtgtagggtgtgtgtgtgtgtgtgtgtgtgtgtgtgttgtattttgattttatggaggatttgtgggagaggaggtgtaaggttttttttttagaagtttggcgtttttaggttttagttacgcgggacgtttttcgataattcgatttttcgttaggagagattcgatttaggtttgcgtcgcgaggtttttagttcgtttttttttgcgattttaaatttgggttttgatttttcgtcggtcgcggtggttcgggttattcggcggcggttgatagttgagcgtaaaggcgtcgcggttaaggttttcgcggagtagttcgggatgcgtacgtcgagggttaaggaggaggtcgttcggtttggagttgggatcgtaggttgggggtcgggatattcgggtttcgtcgggtcgggggtagggtcgcgggtttgatagttgttgcggttcgcgcggacgcgcgttttttgtagttcgttttttttatgtttgatttattattttttgttttttttttttttgttgttttaaaatatttttcgacgttagtaaaatataatgcgtttcggtcgtcgtaaatagtcgggagggagagtatatattcggcgcggcgcggtcgtcggttcggtttttatttttttttcgtttttagaaaatgttataaaagcgggtagggcgcggggagggcggttgcgcgttcggcggtcggggtttttttttcgcgtcgtttttttacgttttttcgttcgtttcgcgcgttcgtttttttcgtaaatttgtttcgttatttcgtttagcggcggggttcggggttcggggttcgggatttatttcgtcggagaattttgcgttttttttcgttttttttttttcgcgttttttcggttcgtagttttttttcggtagtcggcgaggtgggtagttcgtgggttatcgaaagttcgcggaggggacgcgtattatatggtagttcgtttttagtttttcgagtgcgttgggaagggggaggggaaggggcgaggggaggtcggggggaaagcgagagcggggcggcggcgggagtgggtaggcggggtggcgagggcggcggtcgtttacgttagcgttgtgcgatcgtagttcgggcgtgtacggtcgttgttgtcgttgttgttgttgttgttgttgttgaggcggcggcggttcggcgttgtttgtttcgcgtcgcgcggtttgcgtttttttcggaacgtttatatttttaatcgttatattgttgatattcggcgttgacgttattcgttttttatttataataattttacgggagtcgggtagcgtattttttcggtcgttggggcgcggtacgttcggcgattagcgtaagtcgtttcgcgaatggcgtttcgggggttggggcggggggcgggggacgggggcgggcgcgcgcgtttcgttggttcgcgggagggggcgcgttttatgtcgtcgtagtagtagattttttcgttttgtgcggtcgcgcggttcggagagtttttttttttcggttcggttgatcgtttcgttcggtttggttttttcggttacgaaagacg

SEQ ID NO: 11165 - DNA, 506 bp, synthetic construct
  misc_feature 1..506: note = Description of Artificial Sequence: Synthetic polynucleotide
  source 1..506: mol_type = other DNA
gcgttcgttgttttcgagtttcgggtttgagtgttggttggcggagatttatagtgggtgtttcgttttcggacgatgtttttgggtttttagatttagagtttcgggacgaaattgttttaggaagattcggaaggattcgtcggtcgcggtaagggataggcggtttttgagataggaggagttaggaaatgcggggtttggtggggtgaggagtacggggttttttttttattttcgcggggattttgttatcggtttagtgtggaggttttatcgtttcgttcggattcgtggggtttcgatagtgtggtttttgcgaggattttttttatttttttcgttttggggttgttgcgggagggcgttcgggtagtattaggttttgagtgtttagggttcggtaggggtttttcgttgtcgtttttttgatttcgtcgtttgcggtttagggttgttggttttttcgttggtttgggaggttttagtatggacgtcgtgaggcg

SEQ ID NO: 11166 - DNA, 1503 bp, synthetic construct
  misc_feature 1..1503: note = Description of Artificial Sequence: Synthetic polynucleotide
  source 1..1503: mol_type = other DNA
tcgagtgggacgaatttttcgttagttttgggtttttttatttgtcggttcgcggtcggcgtcggtataggcggagggcgtttttttttttttgcggttttaagttaagtggaagatttttttttaagttttttttttcgaagtttcgcgggtttttcgcgttttagttttagttatagtttgtggaggcggtatttcgaggttgggcgttcgtgcggcgttttggttttagtatttttcgtttcgaggttcggtttcgggggcgcggtcgttcgggttttcgtgtgttttagggggtttcgggtcgcgagtcgttgtcgaatggtttttgataaaaaaatttttgattattaaggttagtttttttttgaaagtttcgttcgtttcgatataggaagtagaagggagcgagagttttagagcgcggcggtagcggcggtttggtttttttagagggttagagttagggatatgcgggcgttcgggatttcgcgtttcgcgcggttcggcgtttgagcgttttcgtttttcgtttcggagttgtcggcggtatgattcgatacgtcggggcgttcgcgcgcggggattttacggggtaagttcgggcggtcgtttttttttttttcgcgatttttacggttcgcgttttggtcgttttattttattttttgttttagagagtttttcgggcgcgtgatttcggggttgtcgggttgatacgggatttttatcgtggtcgaggttagaatttggttttgcggggtagggggcggttttggtgatttcgttggattcgatgttggttaaatttttaaggttaggtattttattgggaatttagtgtatattttaggttgttggtggacggattacgagggagtgcgtcgttatttgttagcgtcggggttgttcgcgtggacgcggttttttttttggcgtttgtttcgtttgaattttgtaaataaaattcgcggttttagtttcgttagtttgttgtattcgttgttttgcgagtcgtagcgcgcgttttcgggtattagagtttcgttgggcgtggggtcggagattcggattttcgtaattttgggtgttcgcggtttaatagttgatcggtttttttggatcgagggtttattgggtttttttttcgtcgtttttttgttttggtcgtagacggtgattttcggatcggttttggtcgagtttagtgtttgggtagggtttagggcgtacgggttgcgcgcgggttgtggatgtatgacgtcgaatggtttgggaattgatttggagaggagttttcggtggttaagttttcgtttcgtttttttgtcgtttttagttttatttcgcgagttcgggtattgttcggggttgggttttgggagaaagttttttcgttttgtttagtttagagggcgttttgagaagttttaggtgttgtagagacgttcggtcggaggcggattttcggggaaagtttatttttgggtatttaggagcgcg

SEQ ID NO: 11167 - DNA, 907 bp, synthetic construct
  misc_feature 1..907: note = Description of Artificial Sequence: Synthetic polynucleotide
  source 1..907: mol_type = other DNA
tcggatcggtatagggggacggttagacgggatgtcggaagttaagggacgtagaggtcggcgggtggcggcgatggagaggatagattcggtttttagaggaggtcgtgagcgcggggtttgcgtcggtcggaggagggattcggggggttgtaatatggttgttcgggcgtcgttttttttttgttaagttagggttttggggagttgttgtcgtttttcgttcgggttggggcgaggaaaggaggggacggcgttgcggtttcggaatttgtattgcgattttggtagagtaaacgttgtatttgtagtttcgaattgaattttttgtttttttttttttttttttttggttacgttttttttttttttttttattattttattttaattggttttaaacgagggtgaaagttgagtttgaggatgtcgttgttatagaaattgtatagtaattaagggttggggaggcggggggggggggcggtaggttttttttttttatttttagtacgcgtatatttttttttatttttttagttcgtcgcgttttttcggagatttatatcgttatttttcgtcgtagaacgggagggataggaatacggacggagggatcgggacgaggggagggttttacgtagtatagttgtttttttgcggagcgtttaggagattcgggtatttttggaagcgttgcggattgagttgttcgcggttgttttcgtttcgagggtcgggatagtattttaggagaagagggacgaagagggacgatagataaatagttggggagaggcgggggggggcggttcgtggggttcgttgggttttatttagttttgttcggagttgttcgaaatagtatttaggtttttgcgggttaggatgaaaggtacgtgggtcg

SEQ ID NO: 11168 - DNA, 1925 bp, synthetic construct
  misc_feature 1..1925: note = Description of Artificial Sequence: Synthetic polynucleotide
  source 1..1925: mol_type = other DNA
tcgtcggttttaagtaggaaggcgttttcggtatattagttttttttagcgtttttagcgggttcggcgtttggagggttaaggcgggcgcgtttcgcgggtgggcggggggggggggacgggatcggtgtcgggagtttcgttgttttggcgttttttgggtttaggtttagtcgttttttgggtttttttcgcggggtcgttttcgttttttttttgtcgagacgggcgtggggtacggggtcgtcgttcggcggggagtttattcggcggcgtagacgtttcgcggtttcggggagggatttggtttgggtttcggtttcgcgtttttttggggaggagtcgagaggttgtagttggcggcggcggtttcgggcgggagggggttttaggaagcggttaggtcggagttttttattcggtcgtagttgttggtttggttagaatcgagcgcgttttttcggttttcgtcgtttttttttgtaaatcgcgggtaggaggagttttttttttagcgggttcggagtttagaggcgtcgcggggcgcggtcgaggggaggaggaaggagagcgggagcgtagtcggttcgggtttagtcgtgattcgtggggcggcggtttcgttaatttgtgggcgttgacgcggggggcggtttcgcggcgttcgatatttgttcgttcgggacgcggggcgtcgagaggttcggttaggcgggagttgcgttcggggcggtcgttgtatttgttcgggatttcgtcggtcgtttttcgcgtttatttttttcgtttttcgttttttttttttttttagtttcggtttttcgggcgcggcgtgagagtagagttcggttcggaggagtcgtttttttttcgttcgttcgttcggcgtttggagaggagcgcgttgaggatcgggacgtttgcggtcgtcgttatcgtttaggttcgtcgcgtttcggtcgggatggatttatacgttcgatgagtttcgcgtcggcggttgcgagcgtcgagtttttttttgttgcggttttagtcgtttttcgcgcgttcggtttcgcggattaggatttttgggtttttcggttgagggcgcggtcgtttcggagaggtcgagcggggacgggttcgagatggcgcggggatttagcgtttcggcggcgggcgttttgtacgcggttcgggttcggggatagtttcggagttggtagtcgttcggtatcgatggattttgattcgcgaggcggcgtcgcgttcgtgtttagttgtagttagaggggcgcgcgggtagaacgcgttttaggttcgggtcggttcgcgcggttatgaagatgatgttggtgcgtcggtttcgcgtgtttattttgatggtgtttttggtggtttgcgcgttgtatatcgttttggatttgttgtttaggttggagcgacgcggcgcgcggttttcgggggagttcggttgttcgtgcgcgtagttcgtcgtcgaggtggtcgcgttcggttgggtttaggttcggggtcgtttcggggagttttcggtcgtttttttcgtcgtcggcgacgcgggttggtttaataagtatacgtttcgtattttgtaggattttagtttcgattttttttttaatttttcgttttattcgttggagaaattgtcgttcgcggtcgagtcggtcgagcgcgttttgcgggggcgggatttcggcgttttaagattttacgatttcgcgtatcggtcgttgttgcgagatttcggttcgcgtcggttcgagtcgtttttcggtttcggcggagacgttttttttttggttaggttgttcgagtattcgttttatcgggtggcggtttcgtcgtttacggaggaggacgttttgtttaatgtgaatagcgatattaggtttagttttaaagcggcggagaattcg

SEQ ID NO: 11169 - DNA, 1287 bp, synthetic construct
  misc_feature 1..1287: note = Description of Artificial Sequence: Synthetic polynucleotide
  source 1..1287: mol_type = other DNA
tcgtggttcggaagtggattttgttcgacgcgggggtggtcgttggagggtcgaggatgtttatataggtttttggagggtgtgttttcggagtttgtttcgttttttggatttatgggggattagtaacgtcgttatatttttttttgtttttgttagtcgttttttcgttttttttttttggttgaggttggtaaaggtaggtaggtatgggggggcggggttttaggagggaggaggggttggtgggcggggtttacggatatttcgtttcgtttttagtggggtttcgtattttttatatttcgcggtttttttaggttagggttttttattatcgcgtttagaggtcgggttagtcgggcgtgtattttaggggcgtttcgtttttcgcggtttgggattttttagttaggatagtataaaatttttttatcgtttattttttgtaaaaaatcgtggttttcggcggattttggagataggaggtgtaaagggcgtttatacgcggttcgggttcgcggtcgagagttggggggatttggagcggggtcgggtcgtaagaagattttgattttgtttcggcgttggggcgcgtgttaagggttcgcggggtattagttgtattttcgaatttttgtgtttggtcggggagtttttaaggttttatttcgttttggagggggttgcggaagttcggaggtgattcgggttttgggaggggcgtttttaacgtgggggaagggagataggggttttcgaagatagcgcgagattcggagggggttttttcgatttaagacgtggtaaattgaggtcggcgaggagcgaggttgagttcggggattaggcggttttttattgttttttcggttcgtcgtttttttgcgtttgttcgtacgggtagggtcggcggtcgagtttagcgggttcggggttaggtttgggtttcgggggcggcgttttttttttcgcgtcgtttttatgttcgtttttcgcgtcgttttcgttcgagttgtttttttttaagtagtcgttatcgcgtattttgtgttggggtcgcgggatgcggggttggcgcggggttacgtttcgtcgtagtttttgttttattcgtaggtaggagatcgcggttattattagcgttattagtagtatcgttagtttagtttgggcgtaaggagagggatgttagggattcgcggtcgtttcgtttcgtatttttttcgtttatatttttcgttgagataggtttttttttttttcgggagtttttcgggttacgcg

SEQ ID NO: 11170 - DNA, 2906 bp, synthetic construct; identical to SEQ ID NO: 6464
  misc_feature 1..2906: note = Description of Artificial Sequence: Synthetic polynucleotide
  source 1..2906: mol_type = other DNA

SEQ ID NO: 11171 - DNA, 2146 bp, synthetic construct
  misc_feature 1..2146: note = Description of Artificial Sequence: Synthetic polynucleotide
  source 1..2146: mol_type = other DNA
tcgcgtgttaggaaaagttgtgaggttggaaatttcggagtaaggttcgattttggttagatttgtaggttgcggaatcgggggcgcgcgggcgtagcgtagtatagttcggttatggagtacgcggtggttttttgcgttttttatttagggattgagttcggggttgtcggggagagcgagagcgagggcgtcgcgttttcggcgtagatattttgtagtttcggcgcgtttttgtgttttagtttcggggaagagttttcgtcgtagtttttcgttttagcggcggaaggcgcggttattttttcgttttttagcggtggttcgcgggtggtggagcggtagtgggaggtcggtagcgcgggcgtcgcgttttcggaggagttcgcgttttttgaggagcgcgcgtgttcggaagagttcgcggcgtcgtttttcgaatcgcgcgtttggtttgaggatttcgcgtttttcgaggagttcggggagttcgcgttcgtattttcggggttcggggcggtgtacggggagtcggatttggtgttggaggtgtcggggcgtcggttgcgcgcgtataaggcggtgttggcggcgcgtagcgattattttcgcgcgcgcgcgtcgcgggacgtgttgcgggtgtagggagtgagtttgacggcgttgcggttgtttttcgtcgacgtttatagcgggcgtatggcgggcgtgcggttcgataacgtggtcgaggtggtggtcggcgcgcgtcgtttgtagttgttcggcgtcgcgtagcgcgttatcgacgtcgtggggtcgtagttgagtttggttaattgttacgaggttttgagcgcggttaagcggtagcggttgaacgagttgcgcgacgtcgtttattgttttatgagcgattattatttggaggtgttgcgcgagttcgtcgtgttcggtcgtttgtcgggcgtagagcgggatttgttgttgcgtcgtcgtttgcgcgtcggtcgcgtttattttttggtcgcggcgttcgggtcggcgggggagcgcgcgggtagtcggttttagagtttttcgggggacgcggacgcgcgcggggacgcggtcgtttattgtttttacgcggcggtcggagagtggcgcgagttgacgcggttgttcgagggcgcgtcggcgcggggttgcggtttgtgcgttttttataattattttttcgtggcgggcggcgtggcgttcgcgggtttcgacggtcgcgcgcgttcgttcgattaggttttttgttataattcggttacggatagttggagcgtcgtgaggtttttgcgttaggcgcgttcgtagttgcggttgttggttttggacggttatttttacgtcgtgggcggcgagtgtttgtttagcgtggagcgttacgattcgcgcgtcgatcgttgggttttcgtggcgtcgttgtttcggggcgttttcgtcgtggcgtatgaggttattatttgttacggcgagatttacgtgttcgggggtttttttttttatcgtttgtttaagtatgattcgcggcgcgacgagtggtaggagtgttcgtgtagtagtagtcgcgagcgttcggtcgatatggtggttttcgacggttttatttatcgtttcgatttgagcggtagtcgcggcgaggcgtaggcggcggggtcgagcggggttagcgtgtttcgatattattgtttggttaagtagtggagttcgtgcgtcgcgtttttgcgttttttcggcggttttacgggtttgtagttttttcgttgcgtcgttttggacggcgttatttattgcgtgagtcgcgcgggtatttggcgtttttagtttgttcgggaaggcgaggtcggcggcgacgtaggttagggcggcggtttcgaggcgttgggcgtttttttggacgttcggggtgtgtttatttcgttcgtttttagtttgtttgagaagtcgtttcgaggggagtagggcgtttcgtaggtcggcggggtcggcgggcgtttttttcggtaggggtttgcggggtttaggtttttttgggttcgcggaggaggacgtggtggggagtcggggtcgttggttacgttggtggtttggatatttcgaaggagtttcgaggacgtttttagggtcgttttcg

SEQ ID NO: 11172 - DNA, 865 bp, synthetic construct
  misc_feature 1..865: note = Description of Artificial Sequence: Synthetic polynucleotide
  source 1..865: mol_type = other DNA
gcgttttgcgttttttttttacgttatttgttagggagtcgttaaatagtaagatcgcgcgttttgcggttttagagtgcggatttcggtcgcgtgcggttttgatcgcgtcgttttatttttggcggggttacgtacggacgttatggttggcgtcgcggagtcgggcgatgcgcgcggattttttcggggttttgattgtttttgagttttttttgcggggggcgtgcgcggttcgtttttcgcggcgttacgcggttttttttcggtcggggattggtgcgttgggcggggcggggcggggcgggataaaggcgcggggtttggttgcgcggggtttgcgggtagttttaattttgggttcgtagtttgcgttgggtgcgtaggaaggttagtgtgggggtcgttcgatatttttttttcgcggaggtgggagtcgagttatattttggagtggggattggtcgcggagcgggttgtttagggtcggtcgaggtcggggcgagttttgcgcggcgttggagattttgtattttcgggcgcgcgtagggttttcggtcgtggtcgtagagttaggaggggcggtttcggagttcggcgcggggagggtttaggcgtagtcggggttggtagggcgcgatattcgtttttttttatttttgaaagggttttttacgtcgagaagaggggcgggtatggtcggttcggcgaaatcggtttgtatagattttgggaagttatcgtttgcggagggtgggattttatagtttgtttatttgtttaggttgagatttcgtgttttagttttggatgttttacgggtttttcgtttcgggtagcggcgtacgggaggagaagattttcg

SEQ ID NO: 11173 - DNA, 865 bp, synthetic construct; identical to SEQ ID NO: 11172
  misc_feature 1..865: note = Description of Artificial Sequence: Synthetic polynucleotide
  source 1..865: mol_type = other DNA

SEQ ID NO: 11174 - DNA, 1463 bp, synthetic construct
  misc_feature 1..1463: note = Description of Artificial Sequence: Synthetic polynucleotide
  source 1..1463: mol_type = other DNA
tcggggggtcgcgggacgtttaggaagcgaagcggggaaggtttcgggcgcgtcgtaggattcgcgttggagatgggtttgaagttttgttttgaaaaagtcggttcggagtgggttgttttcggtgtttttcgagtttttatgttgttatttaagtagtagaggaagaatcgggtttggttcgggaagggtgggtttagggttaggggtgtaaatttttcggtaaaagtcggtaaattaaaagtcgtatatattttaggtttcggtttaggtttcggcggggtagggttttcgaagtttcggggcgcgtagacgtcggggttttcgggggttaagggaacggcgggattcgatttttttgttttcggtttttcgggttttcgtttttcgattagtcgttgagtcgggggttggggtcgtcgttttcgttcgcggttcgttgttttttttcggcgcgcgttattcggtcgtcggttttttttttcgcggggggtttcgtttcgcgtttcgttttttcgggttgtagtcggtagtttacgtttagggagggtggagggaggaggagaggcgcggagaggagggaggggagaggggagggaggaaggcgagagaaagggagttgtttttatttcggattttttagagtttgtttggagcgcgtatttagcggttttcgggttttagcgttttagtcgcggttcgcgttttttcgtttcgttttttttttttttttttttttttttttttttttttaggtattttcgttttttttttttagcggttgtagtttttagttttaatttttcgcgtttatttttgggacgcgcgttttcgttttattttttgttttttttttttttttttttttttttttttttttggttttcgttttttttttttaggtcgttttttcggggttcgattgtttcggtgtttcgttttcggttcgcgttttgtttcgttttttttttgtattttttgagtcgttcgtcgtcgtcgtcgtagattcgtcgcgggagttttagtttaattcgagttcgatagttattgtttcggttttagttttagttttatagttcgcggcgttcgttcgagggagtttcggcgttcggggaaggttttagtgggttagcgcgttttcgtttagtttcgcgttttagttttgttcggttcggcgaggaaggatcgggaagatgaataacggcggtaaagtcgagaaggagaatatttcgagcgaggttaatttttaggaggaggaggtattgggcggttcggtgtggtggcgggggcgacgcgggatttagtgcgggcggtcggcggggcgcgggttcggggcgcggcggtggaagaaggtttaggtatggttcgtgtttcggacgtagttttatagtgtggttcggggagggtggatttcgggagcgtgtgtttttgtgtttacgcgcgtttgcgggttttaaattgcg

SEQ ID NO: 11175 - DNA, 1437 bp, synthetic construct
  misc_feature 1..1437: note = Description of Artificial Sequence: Synthetic polynucleotide
  source 1..1437: mol_type = other DNA
tcgtaggaatcgaggagtcggtcggtttaggtttttaaggttacggggagggggttagggcggaaaaggtagtggagtgagggtgtcgttttcgggtcgtgttaatttcgtttcgtttcgtgtcgtcgaggcggggttttggttacgtaggaggtgcgtttcggaggagggcggcgagcggttacggggtggggagtaaggggcgcgcgggcggtaggtatggaacggacgcggcgtatttcgtttatcgcgggacgttcggacggcggtcggcgcgcgcggttcgtttcgagttcgagagggcggggagataatgtttgttcggcggggtagtttaggtcgtacgttttcgttcgcggatacgggtcgtttttattcgggcgagagggtagcggcgggaaggcgtcgggagcgatggttatttcggtttcgcgaggcgcggtaggtttcgttcgttttttttcgcgttcgtttggcgtgcgttttattcggtaagtttcggggttatagatttatttttttttttagggcgtcgtcggagttcgcgtcggagtcggtgtcggtgttgtcgtcgtgttcgtcgttcggttttaggttgtttatggtgcgggggagggggcggcgggaaggaacgcgagggcgagcgcggcgtcggtttcgcgggaagtgggaaggggcgcggggagcggtgcgttcgcgggtgcggagcgggtggcgggggatttacggggtagtgagaggggtagttttcgcgtcgggttagggttatattaagtttggcgggtgcggaaggtggggagggggtgcggcgggggaggtagtgggagtcggaggggtcgtcgttttcgtttttttattgcgatcggcgagtgcgttgcggcggcggcggcggcggtagcggcggcggggggcgggcgtcgggggagggggcgggcgtcggcggcggggggcggggtcggaatcggttttagttggggttcggttagttttttttttcgttcgtcgcgcggttttcgggggaacgcgtagttaatttttatcgtttatcgtgggttcgtttcggtttcggtcgcggggcgtcggttttcggtcgggttttttttttttttttcgtttgggttagcgttttttttttttttttttttttcgcgtttttttttacggcgagtttttaaattttgatgaattcgttcggcgaatttttttaaaggggtcgcgcgttgcgcgttttagttcgcgggaggtggagtttcgtgtttcgtatttagcgtttcggtttttgggcggttttgttcgggcggtttcgcgtttagggtattcgtagcgaggttttcgggtcgtcgattttttttgtattttgatttagggttttggggttttcgacgtatttattttgtttttaaatttagtcgcgtagattttagtttcgggggatcg

SEQ ID NO: 11176 - DNA, 717 bp, synthetic construct
  misc_feature 1..717: note = Description of Artificial Sequence: Synthetic polynucleotide
  source 1..717: mol_type = other DNA
gcggtaggggcgggattcggaggcggggcgtttgtttacgtcgtttagtagcggagggaggcgcggttttagtttcgcgtttaggagtcgtataggcgttcggggtcgtagtaggagtttttttagggcgtttagcgttgtatttacgagtcgcgcgtcgttttcgtttagtgcgtttaggagcgtcggtagtagcgtgtttacgtgtcgtatttgttgggattcggggttagttttttgtagatttcgtcgcgatcgggttaagtttttttttattttttttttttttttatatttttttgcgatttagcgcgaggtggtttaggtttagtaggtttaattagcgtatagtgggttcggggtttttttgttaggtgaggagtcgttttaggatgattttttttcgtaggagtcgtgcggtgggtcggttttgtaatagttaggcgaggtatatggggttagtacgttcgcggttttcgtgtaggtcgttgcgatttagggattaagtttagggttattttttattatttattcgggaagtaggtttatttttgtgaagaaggttatagtcgtgagacgttgcgggtcgttcgcgttgcgaagtcgagggagtaagtttgcgaagaggtttcgtaggtggtggtcggtatgtgttattatagtattggggtgggtggaaatgggagttttcgtttcgtttggcggttttttttttcg

SEQ ID NO: 11177 - DNA, 1713 bp, synthetic construct
  misc_feature 1..1713: note = Description of Artificial Sequence: Synthetic polynucleotide
  source 1..1713: mol_type = other DNA
gcgttgtagattcgggttttttttttagtttacgcgtaagtcgggttcggtttatatttattatattttttcggttttcgtttagcgtcgttttttttttcgggtttttttagtatcgatttagtatttattagcgtcgtttttaggtttttggtttagtttattttcgggtacgtgtgagtgtgtgtttgtgttagtttgttagttttatcggggatcgggttcgtttatcgagagagaagcgttaatttttgttttagtattatttttagtttttggttttgtttggagatttagtggtttatttcgtgtaggcggtagtacgtttttagtattaatttgaagttcgttacgaattcggtgatgttttcgtattggtcgttggcgaattttttttttatttgtagtagatatatgttttgttcgggttgttgcgggaaggcgcgatcgtttcggttttcgttgcgcggttttttcgttattttttttttcgcggtggtaacgttttttaagggttgtagaaagggggcggtgaggtttcggtgttttttttgtaggaattcgtttaggatgcggtagttttgttgtagttcgtaggttagtttttgttttttgtagtaatcgttttcgattattatcgtttttattttttttttttgatcgttcgcgttttttagcgaggaggtatttttttcgtgggtcggttttgaggtttgggtcgtcgttgttatttttttttcgtcgttttttttttcggtcgtcggtggcggtcgttttttttttttagtcggttttatcgttttcggcgtttcgggtatatttatgtttcggtaggtttaggttgggcggtgtggaatagtcgttcgaggtgttgggggacgcgtgagcgcgagtcgtttttttacggttcggtcgcggcgcgtagttttcgttatatcgggtttggttttttttagtcgtcggttcggttcggtgcgcgcgggggttttgagtttatcgtcggcggggcggggttatatggcgcgcgaggaggggggagagaagaggagagtttaggtgttttttttttttttttttttcggcggcggcgcgcgtacggttttcgtcggttttattttttcgtatttcgttcgtttgttttttatcggttaggttttgtcgggtcgtcgcggtttcggcgttttattttttttcgggttagcggggggttgggagggggcgaggaggaagggggtttttttttttttttttcggagggggtcgtagcggcggtttcggtttttttttttttttatattttttttcgtttttttttatttgcgggggatacgggtagaaggaggcggtgtacggacggggttcggcgataattgttagttagaagtttcgttgggcggtgaggggggagaaaggggaggggtagggagagaagggggagggtatttagtttttcggttgggaagagttgtggagagaagtaaagaaagaggttttgtcgttattttcggtgcgtatgcgtagtagaataattttttttttttttttcgttattatcgtgtttcgtttcgttacgtaaaaggaagagtttcggtttagttataggtttagaagtttgttagggttgcgcggattaatgatgtaattaatcgtaggttaatcgaatatgttgatggagggggaagtaaggcgtttgcgtagtttaattcgttatcg

SEQ ID NO: 11178 - DNA, 699 bp, synthetic construct
  misc_feature 1..699: note = Description of Artificial Sequence: Synthetic polynucleotide
  source 1..699: mol_type = other DNA
gcgcgttcggaaagtcggtttgggttttgttaattattttgaaggtaaagtatttgtatttttttcgtcgaggttggttggcggcgtcgcgttggaggggaggaggttcgggaggaggaggagaaagagtagcgggaggattcgggttgggaggggagcgtagggttggggaggtcgatgagcggttttcggtttttcggagaagtagtcgagacggtaaggaggaggcgaggttttgtcggggcgaggcgttgtttttacgcgtttcggtcgtcggttgcgggcgcggttgggcggggagtcgaggcggtcgttttcgtattcgttcgttcgttcgttggcgtttttttttcgtttcgttcgtatttataggtatatattttacgtttttagtagttgtcgttcggttttacgtatttatttgtatttttttaacgagttatttgatggttgttagcggcgtgggtttcgtttcggcgggcgggggtcggggcggggagaacgcggcgcgggatgtttcgagcgttcgttggggagagaagcggcggcggcggcggcgttgcgggcgcgttagatggggcgggaggaggggagattcggtatttatcggtttagagttgtttgacgcggtttgggcggatttcgtcgttcgggtgtttaggtacgattttagggatttagggtaaagcggttcgcgcg

SEQ ID NO: 11179 - DNA, 1191 bp, synthetic construct
  misc_feature 1..1191: note = Description of Artificial Sequence: Synthetic polynucleotide
  source 1..1191: mol_type = other DNA
tcgatttttattaagcggatggttaagcgttattcggaagtgtttattggtgggggcgggaaggtatcgtagtttaaggtattcgcgggtagggagcgggttagggcgtgcgcgaggtcgggggtagttgggaacggaggaggaggggttcgttcgaggtttcgttttttatcggttgcggtttcggttatagttagggtttagagggtttcgagtttcgggagcggaggtcggagtcgggtttttgtagaggttgtttttttttgttttcgttcggacgtggttttcgttgttcgaggtgtagttgtagtagggttcggcggtatatggtttttagttttttaagtcgggtttttagggttttggggttgttcggttcgttttttcggtcgttgtttttagtttttcggttcgtgttggtttttttagggattcggcgtgttttcgcgggcgtttcgttgtcgttttcgtcggggagtcgtaaagtttgacggaagaggttgcggttttcgcgttttagtcgtcggttttcgagtcgtagtcgggcgtttttttgacgtagtcgcgcgttttgtcggttttattcgtttcgcgtacggatggtttttaagtggttcgtcgttaggtcggtaaatcgtttttttagttgttgtcgggcgtcgttcgcgcggtttcgttagtttacgtcgtcgtcgtcgtcgttggggttgtttttattatgagttcggtcggagcggtttggttttcggtcgttcgtagtatcgttttcgtcgtagtaattttcgcgtttagtggcgttattacgtatgcgttatatcggttttattttaatcgcgtcgttagtttcgtgggttgaggggtcgcgcggttaggcgcgggtaagttcggggttggtagggcggtcggggtgacgacggaggaggagaggaggtcgcgggcggcggttgttggtttagagttaaaggaggtcgggaatttgtttagattgaggcgtgttttgttttttgtggtggagttgttttttgggtttgttttttttaggttgcgttgatatatagttttttcggggagtgttttgttgtttagtttttcggttgcgcgggaaaaagcgtgtatttttagttgagttgtgttagggcgttttcgtgtaggtttgggtattgtaggaattagtcgttttcgttcgtttcg

SEQ ID NO: 11180 - DNA, 536 bp, synthetic construct
  misc_feature 1..536: note = Description of Artificial Sequence: Synthetic polynucleotide
  source 1..536: mol_type = other DNA
tcgttttttacgtgttcgcgggggggggcggggtcggtggattgggcgtgagttaattggttggggggcggggtattacgggttggtttcgtttaggcgttcgcgcggatttcgggtggaatgacgggagggagtttcggtagtttttattttttagcgatggcgtcgttgtgtcgcgtttagtttttagtttgtcggtcggtatttatcgttattcggagttcgtttagacggtgagatttggggcgggttcgaggtagcggcgggacgttatttgcgatcgggattatgaggagttgttagattcgtggggtcggtaacgagagtagtcgcggtatttgttgagaggaaagagggagcggttcggcgcggttggggcgcggtagaggtttgttcgattttcggttatgttattgttttgcgtgcgcggtgagtgcgcggattgaggcggggaggcggggtgtcggcgtagaggttttcgtatttttttagtggacgttcggtgatcgttttatttaaattttatatttcgttcg

SEQ ID NO: 11181 - DNA, 728 bp, synthetic construct
  misc_feature 1..728: note = Description of Artificial Sequence: Synthetic polynucleotide
  source 1..728: mol_type = other DNA
tcgggcgttttattcgtcgtttatcgttttatttttttattttttttattcgggttttttaagtttttgatttaggcgttagatttttttattatatttttttattttaggcgattcgttttggtttcgggtgtttttagtttgcgcgggtcgtttttagttttcggtggatattcgtttttagttcgtcgttttttgttcggttttgcgttttttggaatttttgggtttttagttttcgtcgtttttagaattgcgtttgcgtaataatggttatagtggtgagggggttttttcgtcgagatttggggatggggcggggcgtagggaagggaatcgtcgcggtagtgtttgttcgggggttgggttggttttatcgggcggggtcggtttatttgtttttttttacgtagtgtaattgattttgttttttgggttagagatggttttgggtttcgggcgggagtatcgggttttgtagttgtatttgtattggggggttgtaggtcgttcgggttcggagtatattgtggaaggttatcgtttttttgtcgaggtgagcgcggagttggtcgagaaggggtaaaggagcggggcggagcggggttagagacgtggtttttttttattttcgtgttttttttagatttacgtggtttattttagtatcgtttttgttagagttgacgaggttttggggcgttcgggaggtttggtcgtgttggtcg

SEQ ID NO: 11182 - DNA, 1431 bp, synthetic construct
  misc_feature 1..1431: note = Description of Artificial Sequence: Synthetic polynucleotide
  source 1..1431: mol_type = other DNA
tcggtcggtttttttttttttattttttgatttcggtcgttttacggatcgtagggattgttttatcgtttttttttacgtaattattagagaatttttttaaaaatatagattcgatgaggagtggttttttcgttttttttttgtgtcgagaagggatttcggtcgttaataataaagacgtttttcgttttttttttttcgtcggttcgggttcgtttttttcgcgttgcggttttcggtttagcgtttttttttcgagtcgggttgcggcgtttttaaatttcgaggtcgtacgtatttgtatttgagcggttcgggtcgaagcgtcgggtagaaggggtcgagagagaatcgtagtcgacgcgttgttttttataaggcgagattcgcgtttcgggcgtcgttcgatttttttcgtttgtagattggttcgatagaggagcggggattagggttatagttttcggcgtcggggcgaagaaggacggcggcgttttaggggtttcgtttacgttttcgagtttcgtttcgcgtcggttttgtttttttataagagttcgcgttttgttgattaacggtttcggtgcggggcgttggagcggtcgtcgttgttcgtcggttgttttcgggttttacgtttcgcgcggtcgtggtcgtagtcgtcgtcgttatcgtttttttttttggtattgtagacgttatttagatttagttaggttttttttttttttaattttgttttttttgtttttttttagtttgttaagcgcgaggttcgtttcggtagcgggaggaagattggaggggaacggaggggacgagtataatttttattgagttaggagttggttattgattggaggaaggtgttaaagttgatttcggttttagtttattagcgggcggggggagagacggagtttagttttgttttatttttattaattagaggtcgttcggtagggtgggaggcgttttgagtttaaggagaggttgagttcgtttagtaggaggcggggattgcggaaaagaagaattaataggaataaaggtttttcgtttttttgatttgatggattatatattcgggttaatgggggaatttttatttcgaagaaagtgggatttgtttttcgggtttgagaaagaggttgcgcggagtcggaggggtcgaggttgcgtcgcgtggagtggtttggtttaatagtagggagggtagagcgatgttttttgattttttagaagagttacgtgggttgatttagagtcggggcggaaaggttgcgtttgtttttttcgggttattgatagaagcgttaatttttgggagtagttcgttggttttttttttttttatttttttgtttgttttcggcgaggggtggttttgatttcggcgatgagtttttagaaaggtaacgtggttcg

SEQ ID NO: 11183 - DNA, 588 bp, synthetic construct
  misc_feature 1..588: note = Description of Artificial Sequence: Synthetic polynucleotide
  source 1..588: mol_type = other DNA
tcgtagaataggcgcggagttaggtttttggatttgttttgttggaaggagggtcgcggagacgtaggcgtttcgggtcgttcgcgttgtttttgtttgtttcgtgcgggagtcggggtttttggttttttggttttttggtttttgcggttcgggcgaatttagagcgtattcgtacgtcggtttcggtcggtttttagcgttcgggttttacgggtcgcgtttttacgcggcgttttttagagattttttttttttcgggtgggcggcgtagcggggtttcggcgtcgcgaggatttttcgcgttagaataaaggaatgtggggagggggtagggaggagtttaggttattgagtagttttagtataattgtcgttcggaggcgtttttcggtttcgattcgaggttttcgttcgttattattagattcgtttttagtttcggattttcgtagattttatcggttcgtaggagggagcggcgtattgggggtcgtacggattcgttattggagatcgcgatcggaaggtggcgttacgcggtttttataggtttgggatttttattcgagttcgtaaagtaggtcg

SEQ ID NO: 11184 - DNA, 1203 bp, synthetic construct
  misc_feature 1..1203: note = Description of Artificial Sequence: Synthetic polynucleotide
  source 1..1203: mol_type = other DNA
acgtttaattttcgagtttgtacggtgtagtatcgtttattttgggtttagggtaatttgggtgtaaacgtttttgcgggcggatcgcggggtgggtttcgggtatataggaggattagtagtagtcggtcggtaggcggagcgttgttagaggtttgggttttataataatttttataggattaaaataaacggcgagacgggttgcgcgtataatagtatattcgggcggttagtcgagtcgggggtttcggttcgcggttgcgttaagttttagaattatttagtttcgtgtttgtcgttcggggttcggtttcgtttcggtcggcgtttatttggcggtgtcgttttcggaagattacggcgaaggtttcgtgttttacgagattttttttgttgtattcgaagttatttattatttttatggtcgcgttttcggggtatatagcggacgggcgggcggcgtagtgcggcgtaggtattagtatcgcggtttcgcgggttcggagcgcgttagcgtgcggcgggtttggggtagtcgtagtttcgggttcgggcggatttttatgtcgagagatcggagcggaaattggggaagttgtcgcgcggagttagggttagcgaggttcggttcggtttttgtcgtttatggttcggtttgtcgtcggtcgttggttgtttggcgaagcggtttcggcgttgtcgggttaggggtgtcgttatcgttattgtgcgcgtttagagtcgtatacgcgttttgaggtagtgaggggttcggtattttttatttttagttcgtcgggttttttcggtttttttcgttcggggcgttgttgcgacggcgacggtcgtcgttttagaattcgtatcgtcgcggtttcgcgttttttcgtttcgcggcggcgtttaacgttttcgcgcgcgttattcgttttcgcgcgattggttgtttttcgcgacgttcgcgcgttttgaaggtcgtagcgttagtcggtttttttcgtcggggaaaggagtgcggttagggtttggcgttcgtagttgggtagattttcggtcgtttttgaggcggggacgaagggcgcgattcgttgcggttatagcgggttacgggttgcgggtttcgttttgggtttggggagtagattcgagtcgattacgtttcgggttttaggtcgttgggaggcggattttagagaagcg

SEQ ID NO: 11185 - DNA, 5370 bp, synthetic construct; identical to SEQ ID NO: 6514
  misc_feature 1..5370: note = Description of Artificial Sequence: Synthetic polynucleotide
  source 1..5370: mol_type = other DNA

SEQ ID NO: 11186 - DNA, 1691 bp, synthetic construct
  misc_feature 1..1691: note = Description of Artificial Sequence: Synthetic polynucleotide
  source 1..1691: mol_type = other DNA
gcgtgggggagcggggcgggtttggtagggacgttggtttttcgatcgtgggataggggttgggttgggacgcgggtttttattaggagtcgcgggggaggggtagggtcggagtttttattttcgtaggggaggggttggttcgggacgcggttttttcggggcgtaggggcggggtcgggtggtacgtcgggtttttttttacggtcgtgagggaggggtcggcggcgggggcggatttttggcggtttttttggttggggttcgcgcgttcgcggtagtttttcgtggaggttattgttcgtgttagtttttttcgttgtttcgttttttttcgttgtcgtcgtcgtcgtcgtcgtgttcgttttagcgtttttatttcgcgtttgggagcgaggagtcgttagcgttttcgtttcgtcgtcgtcgtagcgtttttaggtcgttattcgttatcgaaattttttagcgttcgcgtttttttcgggattcggcggcggcggggcgggggcggttcgggggcggcgcgcggttgtttcggggcgtcgggtttttttcggtcgtcgtacggtcgggattcggaggttgtcggttggagggaggttcggagcgcggtcgggcgcgcggcgtcgttataagttgcgttgttcgcgacgaggtgagtgcgtagggttcggcgggtcgggcgcggggttcgtaaatttttgcggggaggcgggtttcgcgttgattttttagggttcggtcggcggttcggggcgttcgaacgttttattcgtttttggaatttttgtaggtgtaggtcgttaattgttttcgcggcgttcggattggggtgcggcgcgtttttaggagtttgaataatatttcgaggtggtcgtttttcgaagtgtcggcgcgttttgcggggagagacggaggtcggcggggggtttttttgttttggggagggggaagtggtcggtaagtttagggaagcgttcggtttttttttcggtgtttttttgtttgtcgatttaggggtttgttgggtaaatttgcgttatcgcgggtttcggggatcggggtggagggcggtggcgggattttttcgttgttggggagaagagttttatttatattcgggacgcgggtcggttttttcggattcgggtggaagcgtagtttcgcggagtggggtaagcggcgggcgaggtggcgcgggtttcgtgtttgtttagtttttgacgcgtagaaattgttaaggaagtcgggagttttagtttttcgtttattttttcggtttgagcgtacggttgggttgggggtatttttggttcgtcgagggtttgtagagcgtcgttcggggagagcgtagatttgttgttgtttttgggttttgacggggcgggtggggtgggtttcgtagattttgggtttcggttttgttatttagggggattttttttaacgatgggatcggtgttcggagtggagtatggggagtgcgttttcgggagtcggcgttggtcggatatgtgataattgtgggtcgttggaggttcgtttgcgttgggatagggtttggattttacgtgcgtcgtttgtgtttcgttagatcggggtcggggttcgttttttgtaaggtttcgtgtttttttagttagttgcgttggacgttttataaaggtagggattgacgtttattttcg

SEQ ID NO: 11187 - DNA, 1223 bp, synthetic construct
  misc_feature 1..1223: note = Description of Artificial Sequence: Synthetic polynucleotide
  source 1..1223: mol_type = other DNA
gcgttgttacggagatttcggtcgtcggagatttcgtcgtagcgaggttattgggtttttcggtcgcggggcgggagcggcgtcgatacggggtgttaggaggatttatcgggcggaggagggggtttgtttattttttcgtatttttttgggtttttttttcgggcggtgacgtgacgtgttgacggcgggttcgtgtcggggagttgggtcgttttttgttagtttcgagttcggtttttttttttttttttcgttcgttttattagtcggagttcggtttagtgttttagagaaaggtcggtttgtagtattcgttatcgtcgtcggtcgttcgtacgttcgttcggtgagtttcgggtgtcgtcgcggtcgcggggtttagtgcgcgtatagcggtttggtttcggtttggtcggcggttcgtaaggcgttttttcgcgttaggtcgggcggcgtggcgcgcggcgtcgagtaggtttcgaggaggtcgtagttaggttcggggaggagttcggttgtttcgagcggcggcggaggcgcgtttcgtaagcgggcgggggttgggggagggtcgttcggttgtgtcggaggcggtcgaggggtttcgggtcggtttcgcggtcgatttggggtatcgcgtcggggtgaggtttggcgaggaggcgaaggttgtaggcgtgaggtgaaggtcgtaggtcggtcgggtcgattttcgttatgtaaatatcggtgagggggggggagggacgggggataagatggcggcggttcggcgtttgttgtaggggacgatagagggggttgtcgggagggggagtcgttattttggaggcggtgtttggagagaaaatttcgttatagttcgtgagggggggtgggagagcgggcggcggcggtagcggcgtcggtgacgggtttcggaggttcggcgcggcggcgtgtgcgcgcggaggggcgtgttcgtttttcgtggcggttattgtttttgtcgttatgatgagcgttcgggttttaggcgttcggcggtagcgttatttttttgttttgtttttcgtagtttcgtgattggttgtagttttcgttgcgttttagttgagttgtcgtaggcggttatcgtcgtcgttcggacgtcgggatcgttttatttttagcgtttttggttttgcgttttttttcgcgtttgtagttattcgagggtagtcggggtaggtggtatttcg

SEQ ID NO: 11188 - DNA, 1103 bp, synthetic construct
  misc_feature 1..1103: note = Description of Artificial Sequence: Synthetic polynucleotide
  source 1..1103: mol_type = other DNA
acgttacgcgtcgttttgttatcggtgttttttgagtgacgttaaaacgttttggatggtggtattgggattatggatggggtttatttagtttttttcggtttgttattaaggggaggggtcgtcggtgggtttttcggcgtcgttgtaagttatcgggtttcgaagtcggaggtcgaaacggcgtgggtttcgaagcggggtcgttttttagggagtgcgtaggttagcgaggatttcggtgaggcgagacgttatttttatttggttgtttttgttgtttttatttttttagttttagtcgtttgtagtgattcgtgattttcgtaggtttttaaggatcgttgcgcgagggagggggttcgaggcgttttcggttcgtttttttttcggttttcggattcgagtcggttttcgggaaagagtttgttatcgcgttttcgtagttatttttttcgcgtgttcggttttttttagtggcgggggtacgtgggcgcgcggggtgcgtggtaagtcgtttttttttttacgttcgttcggtcgtttttcgcgcgcgcgtttcgtatatagttttcgtgtagtgggtagagttcggtttcgcgcgcgtttcgtttcgtttttggttagtcgcgttcgttttcgcgtttttgttttttttttttttttttttttcgttttttaggcgcgtattttttttttcgcgtttttttcgcgttttatatttatcgttcggcggagggggtttagttcgtagtcgtcgtcgttatcgtcgcgtttcggtttcggtgtaggtagcggtcgtcgtcgtcgagatagttgcgcgggcgagtatttttacgtagtaagttcgtttttttttcgtttgtgcgcgcgtgtgtgtttttcgttcgtcggcgttttgggtttcgggggagcggttgtttttttgtttcgtcgtcgtcgtcgttcggggttggtttttgcggtttcggttgtttggttttttagggttgggtattgcggtttcggcggtttcgttgaggtcgggggttaggggtcgtttcgggttgcggggtgcgggacgagggattgcgagtgcgaggttttttttggtgcgtgtttcg

SEQ ID NO: 11189 - DNA, 616 bp, synthetic construct
  misc_feature 1..616: note = Description of Artificial Sequence: Synthetic polynucleotide
  source 1..616: mol_type = other DNA
acggtagttttcgattgaattaattcgatagtatttgtggaagtcgttggttttgtgtcggggttagatcgcgtaattaggagcgggggttttttacgtggcggaggtttttcggtttgggggttacgggttcggaggaatttgtttggaagttttttattacggtagagttttttggagttcgtttcgtgttcgataaggggagttttagatttgatttttttagtagtttcgcggggcggggtcgagaaggggcgggcgggcggaggacgttggcgggagaatgtgcggaatgtgttaggcgtttttatttattttaggaggggtagaggaaggggtcggtcgaggggaggggcgaggggcgaggtttcgggcggtcggagaaaatttgtttgtttttttgcgggcggagtttagttcgcgttttttcgtttttttgcgcgtttttcgttgtgtatcgcgtttcgcgtttcgcgtttgttttttcggttcggttcggttcggtcgggtgtcgtttattcgagggagttcgcgttttgcgattgttcgattttttattcgttttacgagtcgggtatcggtgttaggtagggttgtcgagtcgttattggatgcg

SEQ ID NO: 11190 - DNA, 206 bp, synthetic construct
  misc_feature 1..206: note = Description of Artificial Sequence: Synthetic polynucleotide
  source 1..206: mol_type = other DNA
gcggcgggcggttggggaagtagttttgtggtttttcggcgggtgaggtcgagatagagattaatttttaggcggcgttttggcgttgagttcgcgttgaataagattttttcgtagttttgcgtttcgcgtcgggtgaaggggcgtgtttttgtaggcgttcggggttcggtttggagttggcggtcggtacgtcgtttttggcg

SEQ ID NO: 11191 - DNA, 1141 bp, synthetic construct
  misc_feature 1..1141: note = Description of Artificial Sequence: Synthetic polynucleotide
  source 1..1141: mol_type = other DNA
tcgtagtttgggagcgcgcggtttcggggatggggagggggtcgggaggaggcgtgcggttttgggggcgcgtattgcgggagcgcgcggtggcgaggatagggcgggtcggggttcgcggggcgaaggcgcgcggtgttcgggggagggcgggtcggggcgcgcgggtcggggcgggggcgcgcgggtcggggcgggggcgcgcggggtcggtcggcgcgcgggggcggcgggcgcggcgttgttaatcgtagataaaggtcgttttagtgaattatgtggtgtcgggggaggaagtgcggtttgtttttttttttttagtttcggggttgtaggttgagcgcgatgcgcggagattttcgcgggggcggcggcggtcgtgagtttcgatgaggttcgagcgttttcggtcgcgcggtagcgttttcggttcgatggagatttcgtcgtgggatttagttcgtaacgattcgttgtcgtttacgttgatttcggtcgtgtttttttacgtgaagtttggttttatcgtcgtttatatcgtgttttacgcgttgtttttcgtgtttatttacgtgtagttttggttggtgttgcgttatcgttataagcggtttagttattagagcgtttttttttttttttgttttttttgggtttttttgcggatcgtttttttttttttttattttaaagatttcgtggcggttaattcgtttagttttttcgttttttggttgttttattgtttttttgtgtgtttgtagttttttatttttacgttgatgaatttgtattttacgtaggtgagttttagagaggtttttggaggcgtttatttggcggggtggttttcgcggggcgttcgaggtaggggcgatggtagtcgcgggggcgggttcggttttagggttgagagtgtagggagaaggcgtcggttttggggtcgttcgaattttgttttgtttgcgggtatttgttataggaaattttttgttatttttaaaaggggtaaggagaaggtaggggagggttggaggtcgtcgtttattcgttgtttttggtttcgtatcgtgcggtggattcggggcgttttttcgtgcgtagcgcgaagtagtagcgtttgtatacgttagttagtacg

SEQ ID NO: 11192 - DNA, 1819 bp, synthetic construct
  misc_feature 1..1819: note = Description of Artificial Sequence: Synthetic polynucleotide
  source 1..1819: mol_type = other DNA
gcgtcgttcgtttttggtttttttgatagtcgtgttttattttcgttttgtgttttttttttcggatagtgttttttttagggtttatttaggagggtgtagcggtggttttcggggcggtggtcgtggtgggggtgttagttgtaggggtgttttcggtgggtgggagttggtggtttttcgttggtgttatgggattcgtatgttcgttttgcgtttttcggtttttgagtttataggtcgggattttgtttgttagtcgcgtgcgttgtcgtttaatttttgtaggcgtagagcgcgcggcggcggtgatagagaattttgtttggttgtttaaatatagttttttgtagaaggattttgcgttcggggaaggggaggaatttttttttttttgggcgttcgtttttttcgttatggttcggtttttatattcgtttatatttggtcgtagcggggcgttcggggggaggggttgaggtcgcgtttttcgtcgttttttgggcgcgggttaggcggggaggaggggggcgtttcggtcgtgtgtttaggattgttttttagcggttattcgggttttagttttttaggtttggttttgataggcgggcggagtagttagtgcgagatagggaggtcggtgcgggtgcgggaatttgattcgttcgggaggcgggggcggggcgggggcgtagcgcgcggggaggggtcggcgttcgttttttttttttatttatttagttgagttagggggtttaggggttttttcggcggttagttttgtattgtaggagcgcgggcgcggcgttttagttagcgcgtagggttcgggtttcgtcgggggcgttttttcgtcgttgtttttcgcgcgattcgttgtttattagttattatgtcggatttcgcggttaacgcgtagttggatgggattatttcggatttcgaaggtgggtgttgggttggttgttgcggtcgcggacgtgttggagaggattttgcgggtgggtttggcgcgggacgggggtgcgttgaggggagacgggagtgcgttgaggggagacgggatttttaatttaggcgttttttcgttgagagcgtcgcgcgttttcggtttcgtgttcgcgtcgtttacgtgggggattttgttaggggtattcgcgtagattttgcgcgtttttataggattttgtgttcgttttgcgtattgtcgtttgggtttttttttttttattgttgtttgtgtttgttaagcgatagcgattttttcgagggttcgcgaggttgtttcggaattttttaggacgtatagttttattttgggaaatttatcggttttttttttttggtttttttcggcggttttcgggtttcgtttggattcggtaacgggatagggaggtcgttttttattttcgattgagtggatagtcgcgttttgttcgggtggatagttttttttttttttacgttagtttcggggtcgttaagttgtgtagttcgtgggtcgggagtatcgaacggatatagtttaggtcgtggtagggtttagagtgggatgttttatggtttttatttaggtttggggatatttttattcgttttttagaatcgggtcgtgggggatagaaggggtttgcgtgcgggtagggagagtattttggtttttttttgttttcggggtttataaagtgtgttgggatttgcggggttgttttgtttaagtttgggtttggcgttcgcgtttttgagtttgtgagtgcgtgcgtttttttgcgtttttttgattgtcggtgttggggttttgcgttttgcgttcgcg

SEQ ID NO: 11193 - DNA, 1813 bp, synthetic construct
  misc_feature 1..1813: note = Description of Artificial Sequence: Synthetic polynucleotide
  source 1..1813: mol_type = other DNA
gcgtttagtttcgagagtttattatagtttacgtttgggcgcgtagtattttttcgatattgtttttgttgtgttagatagtggtagtgttgagtttaggaatacgcgcggagttcgcggcgattttcgcggtcgtttagttttcgcggcggatttcggcgcgtaggagttattgggtcgtaagggcgtcggggagcgggaggggcgttgggggcggtaaggggttttagattttaggttacgaattgtttttttttttttcgggtaagagtttcgttttttttaattgatagaaatttattggggtaggggggcgagtggggagagaggtcgtttagggttcgttattggttgcgtttttttcggttttggtttgggaagcggttttgggtttttcgggcgagtagtttgggcgtcggcgttttttgcgaggaagatcgcggggtgacggtcggtattcgttcggttgggtcgcgttgtcgtttcgatttatttttttttcgcgttcgcgtttttttttttttttttattaggagttcgggattcggagagggcgcgggaggtaggtatacgggttcgattttattttagcgtttatcggggacgcgggcgggcggcgacgggacgcggcgggggcgcggggcgggcgcggttatggagtagtagcggcggcggcggcggcggcggcggtaatattagcgatcgcgggcggacgagcgggcgggtagggtcgtcgggtttagcggatcgaattgtatagtttagtaaaagcgttttcgtttttcgcgcgtcgttttttgcgagtttaaatttattaatattttttaacgttttaatttattttttgaagaaaagtaaaaaaaaaaaaaaaaaaaaaaaaaaaagtaaaaaaagaaaaagtattgatcggagagacggggatatatatatatatatatatatatatatatatataaaattttttttggtttttgttaaaattagtagggttcgtcgcgcgtttgtgtgttagtgtgtgcgagtgtgtgtgcgtgcgggcgtgtgtgtgtgaatgtgattattttaggatttttcgggtttcggagacgttatttttttttttgatatttttttttataaatcggtggcgcggcggaggcggtagagtcgggcgggaagcgcggggtcggtcggggcgttcgtcgttcgtcgtcgttttcgcgcgttcgggggtttcggcgtttttcgagttagggcggttagttcgcggttcgtcgtttgatagatgtttatcgttatggagttgtcgtagtagtatttttgggggttcgggcgagcgacgggagtcgggatttgagcgagcgtcggggttagcggagtcggagtcgtcgggatatgggtgagtacgcgcggcgattttggttcgggagttcgggcgtttagttttttttcgcgtcgcgggttttcgtattttcggaatcgggggcgacgtgtgtgttttgtatgtaaaagtttacgtcgttttgttgggtttttgattttgtattcggcgggaagggggagatcgggtcgagggggcgggatgtcggttcgggcgaggttgtaggagatgggcgcgatttcggcgggtcggcgggtgggcggcgatgttggtttaattggagtggttcgttggtggcggcgatggtggaagttttgggttggagggttgggagtttattgagtttcgtttaatttgatttatttttttttcgtttttcgttttttgtattttttttcggttttgtagtcggttggcggggttggcgggtttggcgttggtggagtggattcg

SEQ ID NO: 11194 - DNA, 1872 bp, synthetic construct
  misc_feature 1..1872: note = Description of Artificial Sequence: Synthetic polynucleotide
  source 1..1872: mol_type = other DNA
gcgttttgttagttaagtcgggtagttagggatttacggagtaaagatttaagcgggtatggtttcgataaagagtgaggttcgttttttttttgttgtttcgttagttattaaagatgagtgaggcggaaatacgacggtggggagcgcggggaatggaaaagttagaaggtttcgtaataattcggtgttatttgaatgtttgtaaaacgtgtcggtaaaggtagttatgtttttatttcgattttggtttagttgttcgggatacgcgttacgcggcggtcgttaatatttaggggatagataatagttatattgtattgatagtacgtagataatatcggcgaggtgtatatttatatatttaacgataggtttcgttattgcgaggcggttgttaatttggagggaatagggaaagttagtcgggttttagtttttttttttcgaagtacgtttatttaaacgtcgtagtttgcgtttaggttgttttcgttttattttaaagattatgttaacgtaggaattgtgggtgcgcgcgggcggttcggcggggagtttttttttttgggtttcgtcggttttattttgggagcgggagggggaggagggagggttggaggaggggaggggaattttaaattaaaataatttttagttatgaggacgttcggtggtatcggatatttatattagtaatagttatattatattcgttttcgttagatggcggcgggtttaatttttcgggatttcgtaaatttaggttgtgcgttcgagcgcgcgtcggagtgtgggtacgcgggcgggttggggattgcgggagcggcgcggcgcggcgcgagttcggggcgagaacgggggcgtggggttggggggcgtcgggtttatcggtttcggacgaggaggttttcgttttcggggagcggtatcgggtagtttcggtttagggtgacggtttcgcggaagttggggtttagtcgggttattattagtttttgtatggtttggggaatggcggagttttggaagtttaggaagtggcgggcgtacgatatgtttacgatggttcgggtttcggtgggtattagtcgtagtatggtttgcgttttcgttcgttttttgcgtcgacgttggtcggggtcggttttcgttcgggtcgttcggttcggttgtgttttgttcggttagggcgggcgggttcgtttttttttcggtcggcgttttttttttggtttttttttttttcgcgtcgttcgttttcgtttttttcgttttttcggcgtcggcgtagttttcgtgaattcgggcgtattatttcgggtgtttcggtttggggatcgttgtcgtttcggtcgttgtttttttaatttttttgttttggtttgaatttgttcggcgtagattggttaaggatttttttcgtttttttttttttttttggcgcgggagaggtatcggatatttttatttttttcgagttttaaaagtcggatttgatttttttcgggtaagggtggcgggggggacggcgggtaaggggggacgggggattcgcgcgtttcgcggtcgtttgcggtttcgagtcggcggtagtttcgggcgttttcggagttgcgcggcggtcggcgtaggcgtttttttttttcgtgcgaagcgtttatttttttgtaaggtggtacgaattaatttcgagcgcggttcgggcggcggggtacgatcggggatttcgggtagggcggggagtttttgtcgtcgttgtcgtacgcgtattcgtatcgatcgcggggcggggaaatgtttagtgtttttcgttttttaggttggtggttttttgttttcggaattttttgcgcgtgttttttgtttacg

SEQ ID NO: 11195 - DNA, 652 bp, synthetic construct
  misc_feature 1..652: note = Description of Artificial Sequence: Synthetic polynucleotide
  source 1..652: mol_type = other DNA
tcgtagatcgtgtatttttgtagggggtttcggatgcgatggagttgcgcgagttgacgttttgggttgggcggtttttaggttcgcgtcgtcgggcggggtttcggcggcggcgcgcgcgtgcgcggttgggggcgcggttttgcgggttgcgcgagttggaggtgcgcgtgagcgagttgggtttgggttacgcgttcgacgagacggtgttgtttcgttattgcgtaggcgtttgcgaggttgtcgcgcgcgtttacgatttcgggttgcgacgattgcgttagcggcggcgtttgcggcgggagcgggtgcgcgcgtagttttgttgtcgttcgacggtttacgaggacgaggtgttttttttggacgcgtatagtcgttattatacggtgtacgagttgtcggcgcgcgagtgcgtttgcgtgtgattttattttattcggtcggcgcggcggttatttttttcgtttcgacggtattattggtcggtttcgcgaaagattgcgcgtgcgtagagtacgtcggcgcggtttcgggattttcgcgataattgtattgagataaagtgtggtaattcgagttggttggtgatttattttcggcgaggggttcgcgtgtgggttacgtcgtcgtttttatcgggaaagcg

SEQ ID NO: 11196 - DNA, 722 bp, synthetic construct
  misc_feature 1..722: note = Description of Artificial Sequence: Synthetic polynucleotide
  source 1..722: mol_type = other DNA
gcgtttatttacggcgcgtgtagggttttaggtttagggagcgagcggggcgttatgggggtcggagtttgggtttaggtcgttttttttttaattttttttgggtttttttatttcgcggtttttttcggagcgtggtttatcgggcgtgaagagcgcgatggttttgaggtagttatattcggtcgagtcgatttgtaggcggtttagtttgtttatttgtttttggaaggcgcgtatttggtttatgaaagttacggcgcgttcggcggttataggcgcggcgtggaggtcggcggcggttagtagcggcgtcgtgtgtaggggtagcgtcgtttgcgtcgcgtttagtacgaagagttcgttttagtttaggcgtagtagcgttatttggtcggttatcggtagttcggggaagaagggcgcgtggcgcgtttattttacggtgttgaagagtagtcgcgtcgttagttcgtatacgttgtcgatgtttagtatcgcgttcgtcgcgtcgttttttgcgtcgaagcgttcggtcgtcgtagggtagggtttagcgcgtagtagttgcgcgattagttcggatatcggttgtttcgggaagaggttttcgtcgttcgttattgtcgttagcgtcgagttcggggggttgttcgaggaggcggttacggtattaggtagcgagtgcgggatgcggtcgcgttgtatcgttgcgggaggcg

SEQ ID NO: 11197 - DNA, 858 bp, synthetic construct
  misc_feature 1..858: note = Description of Artificial Sequence: Synthetic polynucleotide
  source 1..858: mol_type = other DNA
acgattacgttatcgtagattagggttatacgatagatttcgtttttatttatcgttttgagttcgattaaatagtatttacggtatatattagggttttcgttttttatatatatatattataatgacgtcgtaaataatagtattaattattatcgttcgtagttttcgcgtatagaggttttaggttttcggttttacgtggatcgatttcgttcggtagcgcggggttattttatcgcgagtttttttcgtagttcggttcgggttatttcgattcgttaggtttaatttaataattataatatcggaaaaggaagtaaaggtcgaagtttattcgcggttttgaggtttgtgggaaacgtagtttaataacgaaagagttttgaagtttaagcggagttcgttggtcgtaggggtcgtattacgttttagattttggagttttcgggtgcgtagatttttgttattagtagaggttgtcgttgcgcgttttttaggcgcggaagaggcggttggtggtttttgacggtaaggtgaagtcgaggtagtaatcgggaatttaggttgggaggatagaatggggaataggaagttggggcgagggtggttttgggggaggtggggggtcgcggaattttaggtggtttttgttttatttttggaaagaatcggaagttcgggtcggggagggtgaagggagtcgcggattcggttgtttagtcgaggaggaaattcggattttaggttgagggaggtcgaagaaggaattggagggtcgggttgggaaggtttgaagcgggtatagtttttaggttggggagggtcgaggggagaattcggagtttgagtcgggcg

SEQ ID NO: 11198 - DNA, 598 bp, synthetic construct
  misc_feature 1..598: note = Description of Artificial Sequence: Synthetic polynucleotide
  source 1..598: mol_type = other DNA
tcgaggtttcggcgggttttcgtatcggttttagtttttttttcgtatttgtttggtcggcgggttttatttttttttttgttaggggtagattttgggattatttagttcgttttcgtaggttttgagcgtttgacgtttgcgtattgagcgcgggcgggcgggtatttttagaaattttcggggcgttgtaggcgggataagtaggttttataggtcgagtttacgagtttttcgaggggtgagcggttcgggttttttggcgttttggtcggttagttaagcgttggattatattttttagaggtacggcgttcggagcgttggattatattttttagaggtatcgttttcggagcgtagttttattttcgttagtttgcgagatttggaggtttcgcgtggggagagggtcgcgtttgtggaggagtttggtttcgtatttgttgggttggcgaattcgaaattgggtttggaattcgggagttagattttggattttgaattgtatttttgttaaggtaggagtgttcgggatgtcggagcggatacgcgcggagaaagcgtcgttggggttattcgtgtggtcgtgttttcg

SEQ ID NO: 11199 - DNA, 1281 bp, synthetic construct
  misc_feature 1..1281: note = Description of Artificial Sequence: Synthetic polynucleotide
  source 1..1281: mol_type = other DNA
tcgaaagtttaaagtttcgggtttatcggttagttttttatttcgttgttgggtcggataggtgtaggggaggcggattcgtttcgtagtcgatttatttagttttagggtttggtcgtatttgagtagcgcggttttcggttgttgttggcgttgtaggtttcgcgtttggtttgttagtttgcgtagtcggtattcggtcgggaagtatttttttagtaggtcgtttagtattacgtttacgcgtcgtatttgcggtcgcgcgggttttggttttacgtagcgtttgtagattgtgagttcgtagggtagcgttatcggtttatgtagtagtcgtcggtagcgcgggtagtcgagtaggtcgcggggcgcgcggggtttcggggtcggttttttttcgtcgggcgtttcgggttcgtcgttcgggtttttcgcggatagcggtcggtcgcgtaggtttacggcgcgtattaggtcgttcgttagtttttttagttttttcggtcgtagcgtttcgagtcgcgcggcgtcgcggaacgcgtttagggtttcggggaggcggtcggcgcgggttagcgcgttttttagttttaggtataggtcgcggttcggttgcgttagttcggttagtatggagcgaaagagttcggttgttatttcgtagtcgttcgcgcggaaggtttcgtcgtttttttttaagcgttgggcgatcggtttcgcgcggtcgtagttaggatattggggcggcggcggcggcgggatcggttcggggtttattatcgcggggttgcgacgacgcgggttcggagcgaaggcgcggagtagggaggatgcgttgttgttgggaattggtcggcgggagcgcggttttagttttcgttagtagttacgcgcgtttgggggcggcgcgttgcgagcggttgagatcgcgggcgggggcgggcgtttggtttgggtagcgtttttagcgcggtgtgggcggcgagtttcgtagggttgtaatcgtttcggggtgggggtcgggataggtatcgcgggcgtaatttgagtttttgtttacgcgtagcggttttttagtttcgtcggtttaggtaatttaggtcgttgcggtaacgtagtgatcgcgttttaggttcgcgttttttgcgatgttttttttattcgtttgagggtttttgcgcgattgcgcgcgcgttttttgtttgtcgttttttcgtagaggtgtcggggttttgggagtaggtggttttggtcgcgggttgttggcgcgtcggtatcgcg

SEQ ID NO: 11200 - DNA, 1788 bp, synthetic construct
  misc_feature 1..1788: note = Description of Artificial Sequence: Synthetic polynucleotide
  source 1..1788: mol_type = other DNA
tcggttaggttcgtcggtcgttttagtttagtattagggcgttcgcgcggttgttaaatattttcgggagttttgttcgtaaagggattacgaggtagttgttggcgcgttttgcgcgtattcgtttagaggtttttcggtttgtttttcgcgggtttgtttcgaaattgacgtgaaatcgatttggtgtaatgcgaatgagttttcgttcgttttcgtttttattttagtcgtcgtcgtcgttcgtcgttataataatcggtttttattttttttattttacgttttgtttttcgggtttttcgggttataggttatagcgcgggaaggcgtttcgttttcggcgtttcgtattcggtcgtcgcgtattttcgttcgttcggcgttttcgagttacgtagaggcgttttttttcgtcggagacgggaaagtttcggcgtttttagattgggtttcgtttttagttttcggaggggttggggttttttcgcgtgcgtttcgtatttgtcgggggttcgtattcgttttcgtcggggttttagggggtacgacggtcgtggttcggcgtttttgggaggggagcgggatattttcgaaggcggcgcgttggaggcggggagcggtcggggcgtacggagagggcggggagttcgcgggagggggaggagggggaggagggggaggaggcgcgaggtgggggggagcgcggcgggcggtagggagggagcgggagggaggtaagaaagtagtagaaagtgaggttggtaggcggcggtaaaggagtcggcgcgcggcggcggtaggaagtttgtgttcgagaatagtagaaataagagttagggagggatcgcggtcgcggcggcggcggcgagagcgaaagaggaaattgtagaggaggaagttgcgtcgtagttcgagtcgttcggtattttcgtcgtttttgcgttcgcgtcgcgttttcggcgttttttttttagcgcgttttcggtcgttttttcgcgtcgcgttcgtcggttatggttcgggagaacggcgagagtagttttttttggaaaaagtaagttgaagatattaagaagattttcgagtttaaagagattttcggaacgtaagtggggatcggggaggcgagggtggaggtggtcgcggtaggggttgtacgggtagttttagttgtcgtcgtcgttattatcgcggtagaaatttagtttgttatcgcgtttttattgtttcgttttcggcgttgcggagttttttcgagcgcgttcgacgcgtgggtttgcgattttcgggtgggcgtcgttttcgggagggggagggggtagcgtcgggttgttagggagtagtttacgcgggcgcgcgattttttattttttttgttatcgtcgtttttttcgttgttttttttttacgcgtgattgtgggttgagtatggtggggatggttgtttatcggttgtgtgcgtttattcgtcgtgtgtatgggcgtatcgcgttggcgagacgtggttacgagaagattagtttttagtcgtttttatttttgtttttatattatgtatttttatggaattggtatttgtacgtacgaggtgtaggtaagattttgggtggttacgcgaggatggaagggaagggtttcgtagtgtttagggttatacgtgggtagagttttatcggagggtttgtgtattttacgcgggttcggtcgtacgcgtcggggagcgcgtttttaagggagggtttgtgcgcgtcgttgcgcgggcggtgtttttttcgggttgtatcg

SEQ ID NO: 11201 - DNA, 626 bp, synthetic construct
  misc_feature 1..626: note = Description of Artificial Sequence: Synthetic polynucleotide
  source 1..626: mol_type = other DNA
tcgttcggtttttcgcgtagtcgtgggatttcgaggagggcgtttattaggtcgcgtgtgattatgtaaggtaaatagggggtttatgaagttattgaggattaatggggagttcggagtagagtttggggcggggtttggttttggcggcgggcgcggattggtacgttgcggatttttttgttgttttataaggcggtgcgaggcgagttatttttagagggttatataagggggttgaggcggtcgttcggcggtcgggtagcgcgagcgtaagggatagggagggtcgtggcgatattcgcgttagttttcgggacggttgggttcgggttggtcgtcgattttcgattttttattagatgtttggtagagttcggcgcgttcggagttcgcgttttttagagggaaggggtcgcgcgtcgtcgcggcggttttgaggttgacggtcgggaggtgaaaggtcggagtgcggggttaggacgttttttggagggggcgcggcgtagggggtcgcggggaagtcgtcgagggcgcggagcgggaaggaaggatagtggttatttcgttttcgtttgggtacggggtagggattcgcgcgaggcggtgtcggggaggtttttacg

SEQ ID NO: 11202 - DNA, 1037 bp, synthetic construct
  misc_feature 1..1037: note = Description of Artificial Sequence: Synthetic polynucleotide
  source 1..1037: mol_type = other DNA
acgaagttttcgcgaattgaattgagagtagataaaagtacgcgtttttttttatcgttacgtcggttttatttaaattcgcgagttattcgtatttttttttaggagttatagttaggttagaagagtgcggagggacggggttcgggaagagtagggaatttttagagttcgtagttaacgcggaggtgggcgagcgggcgtgcgcgtatttatttgtcggcgcgagggagtgtcgggggggaagggagtggtttttaaaagggggaggggagaaggtagggggcggggagaagtcggttttttaggattcggttgcggcggcgagggaggaggaagaagcggaggaggcggttttcgcgttcgtagggtcgtgttatttgttcgttcgttcgttcgttcgttcgttcgttgcgtcgcgttgtcgatcgttagtatgttgtcgagagtgggttgtttcgcgttgtcgttgtcgtcgtcgtcgttgttgtcgttgttgttgttgttattgggcgcgagtggcggcggcggcggggcgcgcgcggaggtgttgtttcgttgttcgttttgtatattcgagcgtttggtcgtttgcgggttttcgtcggttgcgtcgttcgtcgcggtggtcgtagtggtcggaggcgttcgtatgttatgcgcggagttcgttcgggagtcgggttgcggttgttgttcggtgtgcgttcggttggagggcgaggcgtgcggcgtttatatttcgcgttgcggttaggggttgcgttgttatttttattcgggtttcgagttgtttttgtaggcgttggttatgggcgagggtatttgtgagaagcgtcgggacgtcgagtatggcgttagttcggagtaggttgtaggtaacgcggtttggaataagtagttgggagaaatttggagggtagcggagaagttcgacgggcggttggattttacggacggttttaggggcggtagagtcgagattttggattaaattaagggggattgttgttagcgggacgcggaagttaggttcg

SEQ ID NO: 11203 - DNA, 977 bp, synthetic construct
  misc_feature 1..977: note = Description of Artificial Sequence: Synthetic polynucleotide
  source 1..977: mol_type = other DNA
tcggatttgacggagtaatgtacgtgggtttttgattcgtaatatatttagttaaagtcggtttttattgttaagcgcgttagtagtttatatttattgcggtcgcggtttgatgtggtgatgtttatcgcgcggtttttataatgtagggatttttttgagtggtggtcgttttcgttttagttttcggttattcgtagttttatatcgggttattggtttattatcgagatagttagcgagtttaggcggtttttgtagcgttgggagaggaatgtgcgcgaaattaattagagcgaaattagtcggaggagtcggtcgaggtgtaggtgtaggcgtagtttcgtttagaattttttcgttatatttaagggagttggaagttcgggagggtgttgttttttttttttaggaatagagggttttgaagtgttttttttttagtatatagtcgttttcggggatttggatcgtacggcggtattataaatttggaggaggtatggaggtaagcgttttggcggcgtttttattggtaggtggaggtttttttttttttgtgttgtttttagtttcgggtatttatttttttatagataggattatattttttagcgttcggtttttttgtgtttttaaggtaggagggttagttagcggtcgggagggaggagtggtagtagagtcgattgtttgcggtcggtttgcgaggcgtgtaaggttcgaggtgtttagtaggtgttatcgtagttttagggttgaggtttggggacgataggttttggaggcgcggtaggtgtagagcgtttcggtagttttagggggtgtgttggaggggaatcgtcggtttgtttggatttttcgagtattatcgaggattttcgtcgggatttttttataattttaaatcggtttataatttcgttagagatgatagggttagggaattagaaatcggcggattagcgttagggtcg

SEQ ID NO: 11204 - DNA, 6206 bp, synthetic construct
  misc_feature 1..6206: note = Description of Artificial Sequence: Synthetic polynucleotide
  source 1..6206: mol_type = other DNA
tcgtttttttgcggtaggcgaggcggggtgtaggtgtgagtggggtgggaggaaggggaaaggatcggggtcgtcgtagtttttttggttagtttcgttgggttttgttagtttcgtttgagatcgaggcgtacggattagcggtcgttagtattttataggtggaggatattttttgcgttttaaggttaatgttatttcgatgggtttcgtgtcgttttgattttttttgatttaattttttggttatgatttttttattttttgggtttcgtttttgttagttttcgtcgacgtcgtttttttcgtcgttcgttcgggtttttttattcgtttttttttttttttggttcgacggttttattgaggtaaaaataaatagttttgagggtattttaaggagcgtgtagtggtttcgacggtattttcggggggataaaagaggtggttagttacgtcgtcggttttcggtcgaataatgggcgcgtagtagattgttagggggtatttgaaattcgaggggagggaaatatttgagcgcggttttttttcgcgaggacgtacgacgtagtttcgcggatcgttttttgttcgtttttttttatgtattttttttttgtgtggaattatttaaacgggagatttttggtagttttatgttaatgcgtcgaataaaggtaacggttcgcgggcgggaggttcggaaggtgtttggggtcgggtcgggcggggtggcggttaggcgggttgcgcgtgtttttcgcgtgtttttgggattgatataataattttttatttttgtaaatataaagttttttatcggttcgggtcgggcgtattcggcgtagggaggcgttggttttttcgggcggcgggtattgtagcggtaacgtacggtttttgtcggttgtggttcgggggattgagggtcgggagtgggggtttttgtgaagttagaagagaagtttgtagtagagtggtgatgaggggcgttgatattttatttttaacgtcgacgtttttaaacgcgatattttttgcggggtgagaatgcgggttcgttcggtttttttcgtgaggttagggttttttgtttttttagatattttaaggagttaattttttcgtagaagtttttcgtttttgtttttatttttaagtttcgcgttttttataaattttttgttgttttgattttgatttttagtcgtggtgagggttagagtgaatttcggcgcgtttttcgacggtattttcgtatattaggataggagaaattggagggtttggggtttcgggtttcgtagtcgtcggaggaagaatttatcgcggggttcgtaagggaaagtgaagaggttcgggatttttttaaagcgttggttaggatttcgaaggaaggggaggagttatttgaagtcggggaaggttttttgggtgttttgttttggatttttatgtttattgattttcgcgaagtttttttggaggggggtaaattcgcgttgttttttttaatttaattttacgcggtttatttttcgaatcgcgtgcgttaaggtcggcgtcgggggcgtattgtgatggcgttttgttttttttaggcgaagataaatatttcgattcgatgtttttatgtatgcgggtgtataggttttgagaaaattacgtagaaggcggttgcgatttacggttcgggttgggttatatttgtttggaggtcgttggtgtgtgcgtgcgcgcgtgcgtagtttaattttttttagtttcgggtggtgaaattagtttttaatattagtattttttaagtttttatttattttgattgtattcgtttgaaagtagattttatttacgttagtaagattggaagttataaataaagaaaaagaaacggatttattgaattttagtattttagtagcgtttaatagatttttttggttaaatttagagttttgtttgaatttatttacgtaggagttgttttgttttttttgttggtagaggtgtcggttttttatttttacggtttatttataattatgggtgttgttatttttaaaggatttataaggtgattaattttttgttatttgttgaatggaaggagtgttatatatgtaagatcgaatggggtaggtcgagttttcgttttatgttattttataatttagatgggattcgtgattagaaaataaaattggttaaagttgtttcggaattttttttttatttttaattttattagtattattaattagagtttaaaagagtaaggaaataatattagttatttttagatagaaatatgtttataaattttagataaatttattttaagatttttaatttttggggagattagtatttattatagtatttttaaaattagggtgagattttttaaaatatattttattatatgtatttttttttttttagtgtgtgagttaaaatattataaatataaaattattaaatattttttttttgattaattaatttgattaattttttaattaattaagtttaataattgtttttattataatttatgatttatgtggattttatttttatatgtttaatttttacgttagggtatttttagagggaaaatttaaaataattaaatatttttagtggaattaagcgtaagtaaaatttagtaaaatttgtttggtatataaagttttgtagaaaaatgttttttttttttttaataaagtgatattttttttatagtatatgatattttatgtggtttggttatttgttttttagtgttggacgattagggttattacgtattcgtggggttttttgttttgtttttcgaagattttgttttttgtgttttttcggggttgggttggatagaggatggaggtaggcggtttagtttgggtttaaacggaacggtagtggaggtgggggtgggggtgggggcggggggaattttcgttgttgtttttttttggtggtataggggaggcggtttgttttttcggaggttttagtttgttttagagtatagattgtttttttttttttcgtttagtacgcgttttttttgcgtttagattggtcgcgatcggagtttaatagtaggaggttaattttttttataaaggtgaagggggtacggtttcgtgggggttgcgtttagataggtagtttttttatttcgtagcgttttgattggagtttttgatttagtatttgatgttaatcggtaaataaaatgttcgttcggaatgaaaatgtatgaggtcgcgcggggaggagaaagttaattttattggggcgtacgaggtcgatcgcgcgtttcgggtttcggttaattcgattcggattaatcgagttttggattacgcggaagtttcgggcggtttgggtcgggtttcgttaaagatgttatttttaagtttttaagaatttaaaagtttagaaatttacgtttttttgggaatttagtttagttcgttcgcgttttaatttcgcgttttcgggagattgagaaggtcgtgttaatttttttttaaattcgaaagaaattttttttagtttcgtgggcgcgcggaggttgcgagtataaatatcgttttcggttattgttagaaggtcgggttttttgtttatatttggaatttcggggaatttttttgtttggttttttgggtttagcggtttattcgtttaaggttcgggcggaggtcgttcggattttgttgttttttcggatttttgtttattttttaaatattacgcggagttattgcgttttcgtaacgatttttttcgtatcgtttcggcgcgttttcgtttttatttaattagcgcgtataatttttttttcggtttcggttcgcggattgaatttttttgatatatttggggttattttttttttttgttgttattttgttagcgattcgcgggtaattttcgcgcgggaggggggcgtgtattgtcgcgttgatggacgggtttatttggcggtttcgcgtttttcggaggagagatataaagtttaggtacgtgcgtttttttatagagaagtagtagatcgtgaagggaggcggggtcgggcgtgtgtttggatcgggcggggcggcggcgtcgggcggggcgattaggggcgcgcgcgggggtttcgcgtttttaggtatatttgtcgtatttatcgggcgattttcgagtttcggtttttttttggtcgttttatcgtttttttattttgttaggttgaggagttgcggacgcgttgattggttttaggggaagcgggaggcgagaataatggtttttttttttcgttaaaagggagcggttgtcgggttcggggatagggacgcgcgtgtagggcgtagagttgggtcgagtcgtcgtcggcgttacgcgagtttcgtagtcgtcgcgttcgggtaatgggtcgggggtattgagggtcgtcggggtcgagcgcggaggggggatcgagttagtgtcgtgttttcgggtcgcgttaatatgtttcgcggttttttggtgaagcgtagtaagaagtttacgttcgttttttatcgggttcgcggcggcgaggacggcgatcgcgtattgttgttttcgtttagttgcgggggcgttcgcgtcgagttttcggcgtcgagttcggttttcgggtcgttgtcgtcgtcgtcgttcgcggagcgcgtttatgtagcgttcgtcgtcgcgtttgtttgcgcgtttgggtcgtagttattttcgtagggttcgcgggtcgcgtatttcggtaatttcgaggttgcgtatttcgcgtcgttttatagttttacgcggttcgtgagtcgcgagtacgagaagtataagtatttcgaacgtagttttaatttgggttcgtcggtttcggtcgagtttttttttacgttcgtcgcgttgttcggagggggcggcggcggcggcgcgagcggagttggcggaggcggtatttgcggcggcgattcgttgtttttcgcgttcgtcgagtttaagatgggtacggcgttttcggttggcgtcgaggcggttcgcggttcgggtttcggttttttattgttttttgtcgtcgttttgcggttttcgggaaagcggttttcgttttttatcgtcgcggagtcgttcgttaaggtagttaaggtttcgggcgttaagaagtttaaggttattcgtaagttgtatttcgaggacgaggtgattacgtcgttcgtgttggggtttaagattaaggagggttcggtggaggcgtcgcggggtcgcgcggggggcgcggcgcggtcgttgggcgagtttatttgttagttgtgtaaggaggagtacgtcgattcgttcgcgttggcgtagtataaatgttcgcgtatcgtgcgtgtggagtatcgttgtttcgagtgcgttaaggtttttagttgttcggttaatttggtttcgtatcgtcgttggtataaatcgcggttcgcgttcgtcgtcgttcgcgcgtcggagttagaagtagtagttagggttgaggcgcgggaggtattcggcggcggtagcgatcgggatacgtcgagtttcggcggcgtgttcgagtcgggtttcgaggacgggttttacgagtgttattattgcgttaagaagtttcgtcgttaggtttatttacgtaagtatttgttggcgtattattaggcgttgtaggttaagggcgcgtcgttagcgttttcggtcgaggatttattggttttgtatttcgggttcgacgagaaggcgttttaggaggcggtcggcgacggcgagggggtcggcgtgttgggtttgagtgcgttcgtcgagtgttatttgtgtttagtgtgcggagagtcgttcgttagtaagggcgtttaggagcgttatttgcgtttgttgtacgtcgtttaggtgtttttttgtaagtattgttcggttattttttatagttcgttcggttttacgcggtatattaataagtgttatttattcgaaaatagataggtgatttttttgtaggtgttcgtgcgttcggtttgttagagcgcgttttttatttcggttttcgaattgtgttttcgtttggagatttataaagagagtgcgttttgtatttttcgaattcgagttcgcgttgggggagtttcgttttcgtttttatcgggtgaaagtgtcgttttcgtttttttcggtgtggcgtgacg

SEQ ID NO: 11205 - DNA, 574 bp, synthetic construct
  misc_feature 1..574: note = Description of Artificial Sequence: Synthetic polynucleotide
  source 1..574: mol_type = other DNA
gcgtttttttttttgttcgcgttttcggttttttcgttggtttttgttcgagtttttagtttttttgtattataggtttttggggtttcgtttcggattcggttattttttaggttcggagtagtcgtcgtggaggtcgttttttcgcgtttaggggaagggaaggcggtttcggggttcgttgcggggtggagggattcgcgttttttagtttttcgggttcgggtcgcggggatcgtgcgcgcgtttttttttcgggtaaggtcgggcggcgggcgcgtcgcggtttttggggttttcgtttttttgttcgttatcgtttgcgggagtttttggtttggaggggttcggggcgcgttggcgattgcgggttcggcgataggggcggttggtggcgggaggatagtgggaggaaggtttcgttttacgcgtttttttttcggatgtgattcgtcggggtttttcgtagtcggggcgagcggtttggaagttcggaggaggggtacggaattgttcgatggggatgcgatcgcgggcgttagacgaattgtttttatattcgttggcgttggcg

SEQ ID NO: 11206 - DNA, 3438 bp, synthetic construct
  misc_feature 1..3438: note = Description of Artificial Sequence: Synthetic polynucleotide
  source 1..3438: mol_type = other DNA
tcgttggtggagttcgtttttttgaagtcggagttggcgagtttttcgtatttgattttgtaggcgtttttttcgcgggttagtcgggatattttttgtttaagttgttttatttgttgaatgagttgcgtttttttattttttaggtggtgtttttgttggacgcgtttatatttgtaagattgggcgtagtttcggttttttagggttcgtcgtttttgttttaggcggattatttcgtttttggtgaagtttcgtaggtggcggtttagttcgcgtacggatatggatacgagttggtcgtcggagaagcggttttttacgttgtcgttgtcgttcgtcgtcgtcgtcgaggtcgtcgcgtgcggttcgggttcggggtggttagtgggtagttgttgcgtcgggttagcggcgttggacggcggcggcgacgtttggtgatgatggtgatggtgcgggtgagcgtgcgggtttagttcgtcgtgggttacgtcggcgttcgggtacgtgtggtgcgggtgagggtggtggtgatggtggtggtggtgagcgtcgcgaaagttgtcgaagttttgtagcggttgtggtattgggtgcgagtcgatgagcgtttttatcgcgttttcgggcgttaggttgagcgtttcggggtttatttgttggtagttgttcgttatttagtatagattttcgaggtgtgttttttgttcggtcgggttgaagttgggcgacgagggtacggagttatacggagtgttgagcggtgtggaggatatcgagtcggttggttgtaggcgtgtgtagggtttgttcggacgtttcgcgcgttttagtggttttttttttacgtcgaatttgagtaggtcgaagtcgttgatatattttatggttagcgggttggtgggtagttttggttttatgtttagtttcgcggttatcgttgaagcgaggcgtagtcgtcgttgtcgttcgggaaattttgcggtcggtcggagcgcgtcgagttaagcgcgggggggaagagcggagaagagttggggaggcggggagcgagggcgtagcgggtcggggtcgtcggttaagtttttgtttggggacgcggcggcgcgtcggagagtttcgaggttgtttgtatcgttttagagttttgggttgtgttcgcgtagggatcgggtcgggtagagtcgggcggggtggagaggtaagcggagcgcgcggtggggttgaggggaggcgtggggcgagtgttcgttgttcgttttttagtttttttgtttttacgttttttcgttcgtagtcgttcgtagttcggcggtgtagttgtgttggattcggcggcgtcgtagttttttatcgttttttgatgttattggggtgcgggggttcgggcggttcggtgcgcgggttaatagttgtacggttttcgcggtttagcggcgtagggcggggcgcgtttgatagttttttcgtttttcgcgttagttgattggcggttcgagcggtttcggagcggcggaggtttggcggagcgttggagcggagtgggacggttagtttgggtttattttcgtattttgtaggtttcggtttacgtacgttcgtttggagtgcgcgttttatttttaggttaaattatcgttttttttttttcgcgtattttttttttttagttttttttgtattttatttttatttcgtgttatttttaaggaggtttagaatgagcgtcgggataacgttttttgggttttttgtttttaagcggttttcgtttagtgggcgacgttttgtgtgttttcgcggtttttggtcgtgtgtgtcgtgcgtttttgtttttggagatttgcgcgtatttgtatgttggggagggcgggttcgaggtttcgagagttgtgtttagatttaatttttaattttaggggattttttttaggttaagcgagggttttttttggcgggtgtagtcgtagagttttgaggttcgattttattggtttcgtcgtttttcgcgtttattttatcgtataatgtttatagtgaaggcgacgggaaaagtagtagtttaaaggttttgaatttttttttttcgttatacgtacggaattttgagttttcggagtttcggggtcgaggtcggttcgggacggtgtttcgagtagttttttattgttggggagtcggttttgtttttgtttgaacgttttgtaacgattaagtagatttcggcgttagttcgtcgcggagaggtttaaataggtataaagtgcgattttaagtggttattgtgcgtaaaggcgtcgcgatcgttcggtttacggtcggaaggtttggacggcgtttcgtatttagttaggttttttttatttggtttaatttaagttagtttagaacgtatattatgtgtgtattagagtttaggataggtttttttcgagcgatgtataggttttcgggtttcgttttcgtatttagtcgcgagtttcgagtcgcgagtttcgttttggtcgtttcgttgaaatttcgtgttttagcgttcgggggtgttcgtcggttgttttttgggtcggaaggttttgggcggaggaaggtcggtagttaaaagtggaagcgttatagtgaagcggtttagggttatcgggtgagaaattttttcggagggtagacggggagatcgaagtatatcgtattaggtatttagattgggtttgggagtcgcgtattttttttatttagatttaggatggttagaattaacgggttttttttgagatttcggtttaggcgtcgaaatcggatagatcgcgaattcgttggattcggagattcgattcgtttttcgcgttatttttttttttttagttttgggcgcgcgtagcgaaaggtaggagaggcgcgtattgggtgagtgagtttcggtcgttgtttgcgttggattagttcgattgatttcgcgcgtaggggtcgcgtgagttatatcggtgtagacgcgtttagattatttttaaatgttagaaggtaaaatatttgtttttaattaatttgaaaattttttatttttttgcgttttcggagaggttggggtacggcgtggtattgggtcgtttatttttaataaaatgagtgtattttaattaaaatttaatttaattttgtggggtggtaaattaaatgttggaagagcgcgtttataatttttttcgagaagcgtgtttttcgtagaaatgagtcggtcgtttggagagagagtttgggcggtgtcgttgcgtagtttttgttagtagttgggggttggggattcgtattttgtaaatgttttcgttttgtttgaacgtagtgagagtatattcgtttttagattattcgggatcgggtgtttcggatttgtgtagattatgtatggtttcggttttaggcggttagggcgggataagtacg

SEQ ID NO: 11207 - DNA, 4088 bp, synthetic construct
  misc_feature 1..4088: note = Description of Artificial Sequence: Synthetic polynucleotide
  source 1..4088: mol_type = other DNA
acgtttcgagtatcgattttatagttacggttatcgtttttcggttttcgtgatatcggcgcgtttgttgtttcgagtaggggaggttttgtatttttatcgtatttttttcgttcgaagatacgaaatttcgttcgggcgtcgtaaataattcgaattcggttttttgatatttatttcggcgggcgcgcgtcgttgggagggcggggtgggtggttggaggtaaggaggcgtatagtaggggtaagcgtcgtcgtcgtatattttgtacgtcgtttagggttatattatttatcgaaaattgggaggtaggtttgggaggcggggttgagcgtttatcgttttgggcgcgttcgcgtttttcgttatcgcggttttcgcgttttcggtttacgttcgcgcggtttcggtatcggtttgtatttttagggtgcgcggcggtttatttgggtgcgttttcggtgggtcgatttttcgcgtttttttttcggtttataggggtcgttgttatgggtcggttttttgaagaggttggggcgttatcggggtcggttagaagttttgtttttcggcggggatatttagtcgcgtcggtatcgcggagcgggttgcgttaggtggttggtcggcgcggcgtttttttgttttttggtttcgggttgcggcgcggcggttggagcgagtttttgtttcggcgcggggcggcggcgggcggtcggtaggcgttgttttgcgtgtgagtgtattttatttatatgtaagtcggggagcgtcggggtttttcgcggaagtgcgagtcgttcggcgtaggtaagagtcgtcgggttcgggataaggtaggggcgttcgggcgtcgttgttttgtttcggggcgttttcgggtattttttaattttttttttttttttttttttattggcgtgtttaagagttaaattaaggagcgtttgagggtaaatagatttttgttattcgcgtttttgtatttttttttttgagttgatattttttggtgttttttggtttttcgttgttgttgggtgttttttggtttgtttttgtttttttttcgtttgtttattttttttggcgttaatttttaggtagttagtttagtagttcgaagttcgggtagtcgcgtttcgcggtttcggggtagcgcggcgggaatcgtagttaagtttttcgatacggggcgtacgggggtcgggtagttcgaggtcgggggtaagtagggagttcgggttaggcgcgagtcgagtttttcgaggtggtcgggttattatgttgaagatggttatgaagtttaaagttcgggcggcggagagcgagaagaagacggtcgcggcggttgtcgaggtggttgtcgaagttgcggcggcggttgcggcgttggtcgagtcgagagagtcgttcgcgtcgcggaagagcggggatttcgagaagttcgcgaagaattttaagaattcggcgcgggaggcgtttttcgaaaagtttttaatagataaggagcgtaagaagttcgagaagaagttgttggagtagaggcgaaaggaggagaagaagaaggagaaggagaggaagaagatggagaagatgttgaagaagaagaagaagaaggtgttagaagtttaggaggaggttcgatgtttcgaggtcgtcgtcgtcgcggtcgtcgtcgacgacgatgagggcgtcgaggagggcgtcgtcgggggcgtcgaggagggcgtcgtcgtcgggggtacgagtagggtttgggttgattgggatacggattcgagcgacgaggacgacgtttattacgcggcgtcgcgcgttgggggtatcgtgtggcggttcgggtcgtttaaggttggcgcgttgagcgtttatttgtttttcgtggtgtttttggttttttcggtgcgtagtttttcgtgggtgtttaattttttgttgtagaagcgtacggagtagggtcgcggttgcggtttcgtgttcggggcgatttgttgttttcgagtgtttttgggttgcgttttttttttttatttgggcggtcgcgttaagcgtagaggtcgcgggcgtttcggggttagaggcgttttcggttcgggttatggcgttcggcgtcgggggcgcgaggagcggtttatttagttagattttttatttcgttatcgttattagatattattatcgttgtgtagtgtgggtttttattcgtgttcgtgtgtgtgtgtggatatattttttttttcggttgttttgttttttggttcgtgttcgtttcgttttttttatatttttgttttttggttttttgtgtttttcgttttttcgaaaatttttttaagttcgggcgcgcgtttttttttttttcgtttattttagtttttcggcggcgttcgcgggagggggaggaggtttcgggggcgtcgggcgacgcggttcggggggtggagcgttggcgtcgtgcgaggggtcgttattggcgcggagacgtttttttttttttttcggtttagtcgggttgttgttcgagttcggggggtggggggcgttttttcggttcgtttcgttttcggtcgggcgcgggcggagggatttttttttcgggttttcggggggtcgttttttttcgtcggttttcgtttttttagtcgtcgtcgtcgtcgcggtcgtttttcggtttttttttttttttttttttttttatttttttcgtcgtcgtcgttttttttttttttcgttttttttcgttcgtcgcggcgtttttggttcggggcggcggcgggggttcggtcgaggtaataagagcggcggcggcggtagcggcggtagtagttttcgtagtttttgttttggttcgtttcggttcggcggcggttattagttttttcggtttcggttcgaggggcggggagttgcgcgcgtttttcggttcgatcgatattttttttttttcgttcgttcgcgcgtttcgcggttcgcggttcgtagttcgtttcgcgcgttttttgtcgaggagtcgagttcgcgttcggttcgttcgttcggcgttgtttcggttttttcggtttgcgtgaggtcgttcgcgttcgtcgtcgtcgtagttcggtcgcgtttcgtcgtcgtcgtcgtcgttatgggttgtttcgggaatagtaagatcgaggattagcgtaacgaggagaaggcgtagcgtgaggttaataaaaagatcgagaagtagttgtagaaggataagtaggtttatcgggttacgtatcgtttgttgttgttgggtaagggcgggcggggggcgtcggtttcggttcgggggttttcgaagggcgtttcgtaggtcgcgcgcgtcgagttcgtttttcgtttcgggcgcgcgttttcgagtttttcgttcgttcgcgggttttgtttgtggggggcgaggtcggaagggggatttaggggcgcggattcggtcgggcgggggtttaaaaacggggcggggggtcgtggcgacgcgggcgcgggtttttttttttcggtttgttcgtttagtgttttttttttgttttcgttttcgtttttttttttttttttttttttttttttttttcgcgaggtttatacgacgttaggggtttgggtgcgtgttggggagggggagggggagtttatggggtttcggagattgcgataaaaagagggtttcggggataggaaatcgggtggcgggtagagggagggggattcgttttcgtggggtgtgagatttgttgggagagggaaagaggggaagaaaggggcgaggagaggagggggtgacgttggggggcgtcgtggtggcggagggggtttcgttaaagggaggttttggcggggagaagtggtcgaggagagtgggggggttggtgatattagtttttcggaaaggatcggagcggtaaaggtggtgtagtgggggggagggggcgtaagggagtcgtggcgtcggagtcgggaggggggcggcgaggggaggagggagggcggttgtcgttgggcgcgatttggtgcgtttcgggtaggatcgattgattgtgtgtgcgcggagtagacgtgtttcgggttaggtcgggtcg

SEQ ID NO: 11208 - DNA, 522 bp, synthetic construct
  misc_feature 1..522: note = Description of Artificial Sequence: Synthetic polynucleotide
  source 1..522: mol_type = other DNA
tcggttttatttcgtttaaagtcggatttcgtttagtttcgtgaaagcgaaggagtattagcgttttttgatttcgtatagttttttcggtagagacggttcgttttttttaagaatcggaagtcggatagcgttaggacgttttattttttttatttgggatttagagaggtagcggttaaggatagggttttcgtcgaggttatcgggtagcgtttaggtttcggtttttgggaggggagtagcgggggaggggtacggggaggggcgagggcggggcgcgtttgggtttcggcgttgggttttttttttgttcgtttcgggggatatttataggatttttgtagatttttgtcgaggtaggatggaggtttgtagggatgtatcgcgggttcgcgattcgggcggtcggaatatagttttttttggtcggagatcggttcggtcgtgagtcgtgtttgtgttaggttttttacgttgtgttttagggttttagtgttcggcgcgtcgggggttgtatcg

SEQ ID NO: 11209 - DNA, 2260 bp, synthetic construct
  misc_feature 1..2260: note = Description of Artificial Sequence: Synthetic polynucleotide
  source 1..2260: mol_type = other DNA
acgttttcggaaagttttttttaatgggaagcgatttcgtcgttgagttaagcgttcgaattttttttttcgcggtagggatatcggttcgggttaggtttgcggaggacgttttcgggcgcgtatatatagttcgaggacgcgttttgtattttaagacgtagggtcggattttatttcgaaatttggtttttatagttttaggtcgaattgtgtttggtttttagttttcgagttcgagttttacgtcgtaaagagatggggttttattgtgtttagttggttttttagtacggacgtgtatttttttttggtttgttttttgttaaaaatcggtagtgcgtttcgtttttttgtttagtcgtagtttgtcgttttttagataaaaagcggcgatcgcggttcggttattcgagtttcgtcgcgttgcgtttttgttgggcggtttatagatggtgtttagtacggggtcgcgtcgagggcgggggcgggaggtcgcgaagagggtcgggcgggaggggaggagacggcggagtagttaattcgcgcgcggtttattagttgatcgtttttgtttatattaggtgtacgtcggttgcggggagtataaagcggggcgtatcgcgggcgtcggtaacgagtcggtgaacgaggcgaggttcgtgcgttcgcggttgtaagcgttcgtttggcggggagaggggtcgacggcgttagttcgggcggcggtatttttaggcgtttggggcgttttttttcggatttggtcgttcgttgtttcgttttttgtattttattttttcgatttttttttttagttttgtttttttttgttttggtttttgagagtcgattgagtttagtttcgtgtagtagcggttgtttgtgtcgtcgtttagttttcggttttggtgttttttcgggggtgttttaaggagttagtgcgcgttgcgggttgggaaggaggcgtcgtttagttagttttttttttttttttcgttttttttttttttttgttgttgttgtcgtcgtcgtcgtcgtgggtgtcgggttcgcgcgtattttaatatttttattagttgggtttcggggtaagtttttggtcggtcgcgtcgcggtaggaggtgtgggaggtagcgaggggaagtcgaggtaaatttggtggcgtgggagattttacggggtttggggaattttagggtaagatcgcgggtttgagggggacgagggggcgcggtttacggagttggggaaaatgacgaagtcgggaaacgagaatatagtgtttcgttttttttcgttttttttgttaaaaaaaaaaaaaaaaaggtgtgggagagcgatagttgggaaggtaggttagatagaaataggtaaaaaaaggtagtgatcggagtcgagtttgttggattttaggggtcgattaggggagggaggtgttcggggacggggagggaggagggttgtcgggatgtgaatcggggaaggtagttggggttggagagtagcgcggaaagggggtttagggagttggaaagagggttaagaggagggtaaggaaggtggcgggcgacggggagaggaaagaaaaagggtgttttggcggtggttttggtaagagaaaggggtaaggggtataattgataaggtattgaaagtattgaagttagagttttgggaaggatttatcgaattttcggcggtttacgcggggatagattttagttcgtgagttttgagttttacgcggggatagattttagttcgtgagttttgagttttacgcggggatagattttagttcgtgagttttgagttttacgcggggatagattttagttcgtgagttttgagttttacgcggggatagattttagttcgtgagttttgagttttacgcggggatagattttagttcgtgagttttgagtttagaaggagtggtagttttaggacgtttgttaggtggtttggaatgtgagggaagttttagtttcgttaggaatagagttggcgttgagttttcggttcggttcgggttagaagcgaggaaagtttgtcggcgagtgttttttgtgttgcgtggagaggggtgtgggcggtcgtcgattcggcgttttttcgtcgttcgtttagggagtttttgtttggtaagttggggttcggggaaaagtttagtagcgagagggtcgcgtgtttcgggacggttttaggggagttcgcgcggaaacgcggattaggcgtttcggttcggatgtcg

SEQ ID NO: 11210 - DNA, 1502 bp, synthetic construct
  misc_feature 1..1502: note = Description of Artificial Sequence: Synthetic polynucleotide
  source 1..1502: mol_type = other DNA
tcgcgggacggagatagggagttgggaggaaacgtaacgcgttttttaggtaatagatttcgagtttcggttcggaaacgtttcgaggtagaagtaagggtttttaagggtttcgttttttagttttgggtttttattattattttttttttagattcggtgagtttaggttgatggatcgtgtagtttagtttgagttagtttagtagtttttaatcgggcgggtagggaagaaggttttttattgtcgggaagaggttagcgcgttttaagtttttcgtaaatttcgtttttttcgtttggtacggtttttttgtatcgttgtgtttcgtttttaggtttttgttcgttaagaatgtttgtttcgggggcgcgttcgttggttaggaatttgtcggtagttttcgggaatttttgaggatgcggaggtgggttcgagagttgcggtttcgatgtcggggtgggagttaggtaggtcgcgcgtcgtcgtagttttgtcgtagcgcgtgttttggttttttcggatcgaaaaggtcgaagtcgtttttcgcgatcgatttcgcgtaattggttcgggtttgtatttagatggttgtgggttttatagggatggtcgggcgggttcgttcggtcgttattttagggtcgttagttttcgcgcgcggtcgtttttcgttaggaagggtggcgggttcggaaggttagagatgttttagtgtttttcgcgtcgttacgtatttagttgttcgcgggttttatatggttgcggtcggagggttcgtattaggatcgtcgtcgtttggggaagcgtttttttgtgggtagggcgcggcgggtagtgcggaagttcgaaagttatcggagttcggggtaggggcggcgcgatgtagaggcggcgttcgggggtttttagttgtttgcggttcggttatttagtcgcgattagagggggcgggggacgtaggaatttcggcgttcgggcggtgtgtagtcgtagatttattttaagtttttacgtagttgcgagagtttaaaaattgttacgtgtacgtcgttgttgagtgggaggaggtgtttgttatcgcgtttaaaaggggcgtttcggtgtttttcgttatgtaagtaaatggtatggttttcggtcgtttttgaataaacgagtgtttcgaattttttattaggagggattaggcgtataattattttcgatatttttcgggtatgcgagaattcggttttttttagtggggtttattaatgttgttcgggaggtaaagaaagtgatcggttaacggttttagcgtgggttttttttttttttcgtttttttttttaataaaggacgtacggagaataagttttttagtttttatagatgaggagtttaggagtcgggcgaatattaagtatttattgtgtgtttgtttttttattttggggaggttgggggttcgggagtgaagggggtagcgagatcgcgggttgttttacgtttatcgtcg

SEQ ID NO: 11211 - DNA, 510 bp, synthetic construct
  misc_feature 1..510: note = Description of Artificial Sequence: Synthetic polynucleotide
  source 1..510: mol_type = other DNA
gcggtcggttttggaagaggtgggggcgaggggtcgggggtttatacgttttgcgatttttttttatgagaatgggcgggggtagtttcgggaagggtggcggatggagtcgttttttttttaggattataggggcgttttttagtgaaggcgtcgtaggaaacgttagtttgtgtcgtagtgtacgtagaggcgttatgagttcgagttttttacgtttagggataaattgggagtcgtgattgttaggtcgcgcggaggttgttttggtcgtttttgcggttaggtgaaggcgtagaggtagggaggtcgggcgagcgtaggcgggcggagagtagattacgcggaagaggtcgagagagaaagcggggtattcggtcgggggggttatttataagggacgttgggtacgaaggaggttggggcgaagatgagtttaggggttgggttgagagcgttgcgtagtcgggttgagaagagaagttgacgagtgattttcgataagggacg

SEQ ID NO: 11212 - DNA, 940 bp, synthetic construct
  misc_feature 1..940: note = Description of Artificial Sequence: Synthetic polynucleotide
  source 1..940: mol_type = other DNA
tcggggcgtaggtaggaggtattggaagcggaagcgagtggggagttcgggtagagggagtcgtttatttgatcggtttcgtttttttcggggtttgttgtagttgagggtttcggattagcgattttagaagtcggttcggggtcgggtagtttaatagtttttcgcggattttttttcgttggcgcgtagtagcggcgcgtggattcgcgcgcgggttcgggacggcgcgagttcgggtagcgcgagtttttgcgcggtagggagtggcgtatgcgcgggcgttttgcgagttcgttggggcgagtcgagtcgcggcggcgtcgggagtcgggcggcggagttgtgaagaagtaagcggcggtacgggagtagcggcgacggataggtggcgagttttcgttcgcgtcgttaggggttgttgggttattcgcggagtttcgcggtttagacgtggcgggggtggcggcggtatttcggacggtttgtgagggatgcgtcgtttattgtttcgcgtcgtttgatcgttttcgtttcgattcgcggtgcgttatagtcgggttcgcggtcgttttcgtcgcgttgtcgttcggtcgtcgcgttcgcggggtcgcgttcggtacggttatgtggatttttacggaggaggagaaatacggcgtaggtaggtgaggtttaggtttggtcgtggcgggggttttgggggacgcgtttagttttcggtttcgtttggattcgtattttcgtgttttcgttattgttcgtaggttgcgcggtttcggcgtggggcgagcgcggggtgggggtaggtgcgggtgcgggtgcgggtgcgggggtgggcgcgggtttttgtgtagagagggcggtagggggcgttggcggtgcggttttggtaggtgcggttcgcgggaggggtgggtaaggttcgggtagttgttcg

SEQ ID NO: 11213 - DNA, 2718 bp, synthetic construct
  misc_feature 1..2718: note = Description of Artificial Sequence: Synthetic polynucleotide
  source 1..2718: mol_type = other DNA
tcgtcgttagttatgatttatgttttagtagcgttgggaagtgggtcgagggaattgaggtcggggtgggtgcggaggtggttttgacggggagcgtcgatttaggatttggttcggattttgagttcggtaggatttgtgcgtacgtaggtagcgtcgcgtttttttttaggttgcgagaggttgttttgttattaggttatggatttcgagtcgttcgtgttgcgcgcgcgcgtgtgcgcgttttcgtttgcgtttatgtttgcgtcgggggaggcgaaggaggttttagttttagaaagagtagtttttggaatttattatttaggtcggtcgtcgttcggtttcgtttcgtaggttgtaggcggttttggagggggcgttttcgtcgagcgcgcgtttcgcgtcgtcgtttcggattttttttcggcgtcgcgcgggtaggttcgattaggcggtcgcgggtttcggttttcggttagttttttagggttcgcggttcgtttcgtttcgcgcgttcgtttcgttgcgtaattcgatttaagttggaagtcgatcgtaggcggtcgtattcgcgtttagcgtagggcggcggcggcggcggcggcgtagtttcggcgagcgaggcggcggtcgtacggttaagcgtggatcgcggggggcgttcgcgttcgggagtagtcggaggattcgcggcggcgtcggcgtttcgttcgggaaagtaaagttggagacggagggagcgcgcgggcgcgggggttcggaggagcggcggtcggcgtttcggcgcgtcgagttttagtcggtcggatgggaggcggagcgttcgggtcgtcgtcgtttgtcgtttgcgtttcggttgggtttcgggatcgcggggtcgtttaggtacgttcgttcgggcgtcgcgtcgtcgtgggttcgacgtcggggcgtttttcgtgagtcgggtcgagggcggggtcgcgcgaggatttcgggatttgttttttttttttcgtagtcgcgtcgtcgttcgtttcgggcgttttttgttttgtatttatacgttcggtagttgcggggagttcggtagttacgtttttcggcgcgtcgttcgcggagttattacggtcgagggtcggttgttgggcgtcgcggttttcggcgggcgcgttcgagtagtaggcggcgatgcgggcgtcgatttcggttggggggcgttcgagttgtcgcggttgcgtttcggttttaggagggacggcgtagttcgcgggaggattatggcgttttcggcgttggcggcggcgttggcggtggcggtagcggcgggttttaatgcgagcggcgcgggcgagaggggtagcggcggggttgttaatgtttcgggggttttttgggggtcgtcgcgcggttagtattcggcgggcgcggtggtagggttggttgtcgtggtgggtttttttatcgtttttatcgtggtgggtaacgtgttggtggtgatcgtcgtgttgattagtcgggcgttgcgcgcgttatagaatttttttttggtgtcgttggtttcggtcgatattttggtggttacgttggttatgtttttttcgttggttaacgagtttatggtttattggtatttcgggtaggtgtggtgcggcgtgtatttggcgttcgatgtgttgttttgtatttcgtcgatcgtgtatttgtgtgttattagtttggatcgttattggtcggtgacgtaggtcgtcgagtataatttgaagcgtatattacgtcgcgttaaggttattatcgtggtcgtgtggtttatttcggtcgttatttttttttcgtcgttggtttcgttttatcgttagttcgacggcgtcgtttattcgtagtgcggttttaacgacgagatttggtatattttgtttttttgtatcggtttttttttcgcgttttgttttattatgggtttggtttacgcgcgtatttatcgagtggttaagttgcgtacgcgtacgtttagcgagaagcgcgttttcgtgggtttcgacggtgcgttttcgattatcgaaaacgggttgggcgcggcggtaggcgtaggcgagaacgggtattgcgcgttttcgttcgtcgacgtggagtcggacgagagtagcgtagcggtcgagaggcggcggcgtcggggcgcgttgcggtggggcgggcggcggcgagcgggcgcggaggggggcgcgggcggtgcggacgggtagggggcggggtcgggggcggttgagtcgggggcgttgatcgtttttaggttttcggggttcggtggtcgtttgtcgcgcgttagttcgcgtttcgtcgagttttttttgtcgcgtcggcgtcgggcgcgtagtagcgtgtgtcgtcgtaaggtggtttaggcgcgcgagaagcgttttatttttgtgttggttgtggttatgggcgtgttcgtgttttgttggtttttttttttttttagttatagtttgtacggtatttgtcgcgaggtttgttaggtgttcggttcgttttttaagttttttttttggatcggttattgtaatagttcgtttaattcggttatttatacggtttttaattaggattttcggcgattttttaagtatattttttttcgacggaggagaaggggttttaggtagtgattcgtattcgtttgggaattttggatagtttcgcgttcggggttgggtagaaggggcggttcggacg

SEQ ID NO: 11214 - DNA, 2661 bp, synthetic construct
  misc_feature 1..2661: note = Description of Artificial Sequence: Synthetic polynucleotide
  source 1..2661: mol_type = other DNA
gcgcggttttgtttcgcgttttttttagttagtatttacgtgtttttatttattttatttaggttattagttttatcgttcgtagcgggttagaagattcgataaagcgttttttattttgtaggattagtgttcggttttcgttgttttttcgttttttttttgcgtagatttaaggtttgattcggttttaaattttaaataaaagttgtgggtttgtttttaagtgatggcggttggagaaaattagagttgggggcggtatagttagggtgtatttttgcggtgggtcggttcggcgtatttatagtttttagttgttagtttaggcgttggggtcgtagggattgaatttcgtatcgttttcgtagttcgggtgcgcgttttatcggtcggtttgtttttcgcggttcggtttatcggtggtagggacggtttcgtttgttttagtttacgttcgttttttttttttttcgtttgtggttttgttcgtttttatttaagtttttggtggtttaacgtatttttgtagagatatttattaagagatagcgtgtgtattttgtttttcgttttacggaagaatttattagtagcgttatttagttttattcgttttaaagtacggtattttttagtttaataaaaagatcgaaggcgaaatattgtgggtttttgttcgcgaattaatcgtttagttatcgaattttttaaattgatttatttggaataagttattttgtttttttattttttattttatatatatatatatatatatatatatatatatatatatatatattgcggatcgggggtttagttacgtatatattttaaaataaacgagggatttattcgggatttttagtcgggcggtcgggcgttttcgttttttttttttttttttgagttttttagggattcgttacgtttttcggaattggggtagcggttcgtttatttcgtgttcgttgttggtcgggatgattttagattcgtttattaaggaagatttgatgttagttaaatcgttttttttttcgggatgattgatttcggcgaagattttttttttttgaggatcgttttcgtttttgaaggggattatttcgttcgtggcgtagagtttcgggtttttttcgtcgtcgttatttttttcggagagttggggtatttcggcggttttgtaattttcgtttcgttgtgggagtattcgcgtaatagtaggaaagatagaggggtaatttaagggtgggggaggaaaggagagttggaagggttcgtgtagtaggatagcgggcggaagcggggcgggcgagcgcggggtcgtcggtcggtagtcggagtagttgtcgcggcgttcgaatttcggcggtcgtcgcgttttttcgtttcgcggagatcgacgtaggcgttcgttttcgaggtcgaagggtattgggcggcgagggttgcggtagttggcgatttcgggggcgtttgcgcggcgcgcgttagacgaggttgtttcggcggttatttcgcgatttcgcgtcgtcgggatttgcgcgcggagaacgtcggttttggagggagtacgtttttttaaagtgtagaggagggttcggcggcgcgttttcgcggaaattttttttattgtagttatttcggatgtcgatttagtagtttgtttttcgagaaaagagaggggatttgggtagaagggtttcgtttgttttaaaagaaggtgtaaggattagaagataacgaaacgtttattttttgaagggtgggaaaaaaagaaaaagaaaaaggagttatttacgttggagatgttcgttttagatttttttatttttttttttttcgtttcggttttttttttcgaggtttatttaatttgttagagaaggaggaggagtagaagatgggggtcgaggaggaggggaagagaaagagaagtttgttaagaataaagtttttgtcggtaagcgcggggatttcgtagtggagggtattgcggagtttcggggagttatagcgggggtttcgggtttaaatgtttttgttcggagttcgagtcgatatatatatttagttcgatttttttttgttttcggttcgagttttttagtttggttcgtcggttcgtcgttttgtacgttttcgtcggttagttttgttaaagtaaagagttgcgttttttgagttcgttcggtcgaggggaggggacgtttcgagtttggtcgcgtgcgaggtttcgggcgcgttttggtttttcggttcgagagcgcgtagttcgggtttttttttcgcgttttgtttcgtaggtgagcggttgcgtttttttattgtttttttttttttcgcgtttcgtcggcgttgaaaagttatttatttgcgtcgtttttttttttttttttttttttcgtttttagttttttttggttgttcgttggaggggaggcggggggtgagggggagtcggcgagaaggaggtggtgattgagggtttttttttttttttttttttttagattttgtaggacgagttttggttttggggtgtgtgagtgtggtgtgtgcgcgcgcgtttggagggaaggattaggtaatttggcgagagaaggaaggatcgggcgttgtttataatttatcgaaaggtacgttttgttcgcg

SEQ ID NO: 11215 - DNA, 801 bp, synthetic construct
  misc_feature 1..801: note = Description of Artificial Sequence: Synthetic polynucleotide
  source 1..801: mol_type = other DNA
gcgaggaaaattgacgttttattttttcggattttgttcgagaagttgggggattcgggttcggtgtcgaggtgtggttcgagtttggtattatttacgtcggtcgggtgatttcggttttttggggttttcgcgtttcgttagtaggcgacgttgggaggttggggtaggtttagagcgaggacgggttcggattgggtagtggggatgtattagggtcgggtgcggcgggagacggttcgggaggcggaaggtcgcggatttgttcgatagaagagtagatgaggggagatcgaggacgttcgggttcggggagtttacgaggaggttaggatcgcggggtaaggaattcgcgggtagttattttcgttaggggtagggttcggttagttaggcgcgagaaggttaggcgaggtcgattgcgcggggtgaagacgttaggtcgatagttgcgggttttatcgttagttttgacgcgagtttgcgttttggcgacggcggagggcgggtagggggcgcgggcgttgttacggcgtttgtttagaatcggtcgggaacgtcgcgggcgggttttttcggtttttcgtttttttagttttgtttttaggttttcgttcgggttttttaagttgttagtcgcgttcgttttcgggtttttcgttttttttttcgcgcgtttttttttttagcggtcgtcggatttttttagtttattttttttagttaacgcgtttttcggacgttgttagtttgagcgtataggtattgggcggggtttacgggggagtcgtttaataatcg

SEQ ID NO: 11216 - DNA, 311 bp, synthetic construct
  misc_feature 1..311: note = Description of Artificial Sequence: Synthetic polynucleotide
  source 1..311: mol_type = other DNA
tcggttttcgtttcggtggttttaggtttcgggttttgtttggcggttttgtttttaatgcggagttggcggttttgtagtaacgtttttgttagtagcgtttattgagcggttttttagttgttgtatcgtttttagcgtttaacggaacgtttttcgtacgcggagtttataagttgtttgtgtcgttattttttcggttttggtatcgttagtattttttaggaattttttaaattcgttttacggtgtagaacggtaattgtatcgagtttttgtgttaattagtattttcgtaatatcgttagtcg

SEQ ID NO: 11217 - DNA, 1048 bp, synthetic construct
  misc_feature 1..1048: note = Description of Artificial Sequence: Synthetic polynucleotide
  source 1..1048: mol_type = other DNA
acgggagtaggtcgggttgtttacgacggaagtttcgattttggttggggttgtcggtcgggtagcgcgggagagttagggttagagtcggggtcgggaattttagtttcgtcgtttacgcgggatgtagcgattatcgttcgtcgttttcgggtcggtatttattttcgtggaggggtagcggcgttagtatttggtcgcggatttcggttttgggggagttaagttcgtagcgttcgcggtcgatgcgaaacgtgagcggggcgtcgcggtcgggtttttgtatcgttacgttgatgagcgtcgtgtagtatttttggttcgcgttgtttgttcgtgtcggttataggttgtaggttagtagggcgagcgcggcgagtcgggtagggttcgttcgtttcgcgtagtttatcgttttttcggtagtcgtcgttgttcgcggatcgggtttcggggtcggcgtttagaggcggggcgggcgcggttcgggcggcggcgggagcgcgcgcgcgcggtttgcgcggggtcgagttcgagcgcggtttttttggacgtcgcggtttcgtcgttcgtcgtttttacgtttattgttcgtttgtggggacgcgtttatgggttttcggcgagggcggcgttttaggtcgtacgcgggcgttttttcggggttttaggagggttgtagaagcgtgttttttttattttttcgggtcggttttatcgaatgggaggcgtttcgtaaggacgcggcgggggaggggaagggcggtacgggaggaagcgtttcgaggagggttagcggaatataaagtttttttcgcgcggttgtcgtttgaggcgcgtgttcgtcgtcgtttcgttttttcgttggtttagcggtaacgcgtaggtttaaggcgtagtttcgtttcgagcgtatgcgtgttagggtttgttcgttttcgttcgtttgtacgagggttcgggtagtcgggttagtcgttggtgttggttgtttttttgttaggcgtgatagtcgtagggcgtggagttcgggagatttgcgaggacg

SEQ ID NO: 11218 - DNA, 301 bp, synthetic construct
  misc_feature 1..301: note = Description of Artificial Sequence: Synthetic polynucleotide
  source 1..301: mol_type = other DNA
gcgaaattcgttttcgtttcgaagaagggttttaagaaggtcgtgattaaggcgtagaagaaggacggtaagaagcgtaagcgtagtcgtaaggagagttatttcgtatacgtgtataaggtgttgaaataggtttatttcgatatcggtattttttttaaagttatggggattatgaatttttttgttaacgatattttcgagcgtatcgtcggcgaggtttttcgtttggcgtattataataagcgttcgattattatttttagggagatttagacggtcgtgcgtttgttgtttttcg

SEQ ID NO: 11219 - DNA, 1395 bp, synthetic construct
  misc_feature 1..1395: note = Description of Artificial Sequence: Synthetic polynucleotide
  source 1..1395: mol_type = other DNA
gcgaatcgatttgtatttttttgtttattaggaagcggtcgtcgtcgtcgtaattgttggcgttgatcgcgtacgattggaaagttgtaattttatggttcgaggggtaggttcgggttgagtaggttttcgagtcgttattgttaagtatggggtattttaggaaggagtttatttttgtattgtttatttgttattgagtgatttggttttgcgaagttcggcgtgattgtgttaatttttttattttttttatggggtcggagaagaaaaatgatatgaatgtatagtgcgtaagagggggggcgggagggcggaggacgttggaggaggggtacgtgacggtgttagttaatggttgagttttttgtaaaagtttgtcggttttcgtagtgatggattatcgttttagtggtatttaaattttcggcgtttcgtcgtttaggtgacgcgtagtcgtttttttaggtagtttaggcggcggtagttgttgcggcgattgtaaaggtcgatttggagtgttggagcgaagaagagtaaaagttgcgttttgcgcgcgttcgatttcgttgttcgtttcgttaggttttcgggaggtgggggttgggaggcgtttttcgttttcgttttttttttatcgtttaatgaaagatgaattggcgagaggtgagaagggaagagggttttcggttttttcggggcgggaattagtgggttagagttcgtcgggtggtcgtaagtacgtcggtttagttcgtagcgcgtttagtcggaaggcggggaattcggttgatatcgcgtttcgggtttttaggttattttttttgttttgaggttgggttgggagatcgtggggttgtgaggagcgtatagaatcgtggtggagggcgaggttgggttatcggttttttaagttcggaatggagggggaagagcgtagagggttggttgggaggaattcgggtgggcgtgaaggagacgagggtaagaaaagaaatttttttttttttaggagggttttcgaaattttttttttatagtttttttcgttattagtatggtaatgaggagtttttgtaattcgatttggaggggcggatgagttttggaaatttagagttcgtcggaaaaggtcgggggcggtcgggttttttttttttattttttttttttcgtcgtttttcgttttttttttttttttatttagttttgtatcgggagtttttcgggatgcggagttattcgatcgtcggatttttaggggtaggaggcgggggagagagatgacgttggcggacgtggttagcgcgggggtcgggcggtgcgttgtaggttatttgtcggcgttttgagatttaggagttttcgcgttttcgcgtgggttttatagggtcg

SEQ ID NO: 11220 - DNA, 766 bp, synthetic construct
  misc_feature 1..766: note = Description of Artificial Sequence: Synthetic polynucleotide
  source 1..766: mol_type = other DNA
tcgggtttttttcgttgtggttcgtttgtatttttgagttggtatttgtttttcgggcggttagacgttcgtttggtttttttttcggtttcggtttttttttcgcggcgttttaatggttttcgtttttcgcgtagggttacgattgtttttcggtgttgtttatttatgacgtcgtcgcggggatgttgagtttcggcgggcggttggacgtttttaagtagagttcgtagcgtggtttgacggttcgcgagcgtttttagaatttggataagaaggcgagtttcgagggtggtacggttgcgggcgcgggtttagattcgttgtataagaatagcgttaggtgagagcgggagtcgggtcggcgggtgggcggggtttcggttcgtttagaaatagcgtcgggtgaggaaggggtttggagttttttttttggggtattgtgttgggattttgaggattggggattcggagggagggtaggcgtgtttttaattcgttgcgtcggaacggcgtttgatgagcggcgggttcggatacgaggggacggggtcgatttgtgggcggggttttggcgtcgtattaaaatcgcgtggggcggaggtcggtagaggtcgcgtagcgggtttagggtagggagtggttttgattcgttgcggaataatatcgttagttgtgggcggggtttattttgattttattatagtagtttaggtgttagtggagtttgggagggatacggtgcgatcgatataagacggggtcg

SEQ ID NO: 11221 - DNA, 691 bp, synthetic construct
  misc_feature 1..691: note = Description of Artificial Sequence: Synthetic polynucleotide
  source 1..691: mol_type = other DNA
gcggtaaagaggtcggatacggaatcgttcgttcggtgatcgaagagacggcgaggaggagttcgcgaattcgtttttgtttaggtttcgtttattcgacgtaatttgttcgtttttttttatttttcgaagggtggagtttgaggtttcgtttttaagcggttttttttcggagtgtttggcggttagtagggcggggtaggaggttgggagagggacgggtgcgggggtgggggagaggaagggagcggttacgtgtgaggggcggttcgaggttacgtgacggagcgtcggagcggagggagtcggggttgggagtttttttgagggaagaggagtggagtaggggggacgcggcggcggcgttgataatggtgagtgcgcggcggttagcgcgttcgtttttcgttttcgtttcggagcgcgcggcgggtcggttaatcgcgggtcgggcgtcgtcggaggaggggacgggggagtagggcggggagcggggttaggtttgtcgggttatttttgggtttgggaaaagttggcggcgttattttttttcggtttcggcgaggttcgagtatttacgggcggcggcgtgtttttttggttatgtcggagtttttgttcgcgtttttcgattgtttgttggggttttggttggggattcggatttcgtttttgcgggggttggtcgtcg

SEQ ID NO: 11222 - DNA, 1024 bp, synthetic construct
  misc_feature 1..1024: note = Description of Artificial Sequence: Synthetic polynucleotide
  source 1..1024: mol_type = other DNA
tcgggagggcgtagcgttcgggtggggagttcgagttagtttaggtcggttttggttttttgatttagatagcgtagggcgcgagggatcgcgcggtcgagttcgggtcgcgtcgtttttagtatcggggtcgttagttaagagttcgaggttttttcgattcggatgtgatgaaaaagagtaatagagggagaagtgttttaggattgtaggagtggaagaggggaaagagaggtagagagggggaaggttttttcgtaggggagtcggttggagtgagttggttggaaagagggggcggagtgcgcggagttagagtcgttatcgttgtcgtagttgtcgttattgcggcgtttgggttgagtcggagggaggcgggaggacgcgtaggggcggtcgtcgtcgtcgttaggttatcggggcgaaaatgcggtcgttgtcggaggttcgttaatttttcggggtggaagaggaggaggaggaggaggaaggggtttggagcgattacggggggatgcggaggtaggtagtggttttcgggcggggaagaggaggggtttgatttttattttcggggtttttttaaattcgatttttttttttagttttttttcgttgggtttatttcggatttttgggatttcgtcgttgttaatttgcgttgtaatagtttttttcgtaagttttaaattaaaattttttcggggtggagtttgagggagggaagtggagggggagggaacgtttcgtaggggtggtgtgtttttttttaaaaatatttttttttttaattttgtatattttttcgttagaagtagttagttttttgtatttagtattttatagtttttttttcgtgcgttttgtcgggcggcgagttaggcggtagcggcgcggcgcgggttcggcggagcggtttatgttcggcgcgggcgaagttttcgttttcgggttcgtggggtcgtagcgcgtggtcgaggcgggcggcggttagttgggttttatagtttagggtgagtgcgcg

SEQ ID NO: 11223 - DNA, 1339 bp, synthetic construct
  misc_feature 1..1339: note = Description of Artificial Sequence: Synthetic polynucleotide
  source 1..1339: mol_type = other DNA
tcgtttttagcgtttttaggtttatttttcgtagatttttttcgggtcgtttttttttgttttattttaggcgttttttttttttcgtagttatatcgtggttgtattcgtcgttttttttttcggtcgttattatttcggttttttagaattttagtttttcgcgttcgtagtcgcgtttttgttttttcgattttcgtatttttatttggttcggttttttcgtttttttttcggtttttttttttaggatatttgtgtcgttttattttttttattatatacgtattttttattttaattttttcgtttttttgttttttttttttcgtcggtttttttttttcgttgttgtttcgagagttcgatgtgggagggaaggcgcgggggaggggaggtcgcgaagggggttgttttttttcgggtttttcgtgttgcggaattgtagggttttttagcgttttttgtttttttcgtcggcggcgcggaagtcggggtttttcggacgttttcgatgagggtatttatttttttgtcggggatattttgtagacggttttaatattggtaaatattatagagaattgatttcgttcggtcgtcgtcggtttttatttttcgggtttttcgtttttcgttttcgttcgttttcgttcgttttttcggcgttttcgtcgcgttttttcgcgttcgcgtcgcgcgttttcgtttgcgtagtcgttttcgcgttttagtacgttcggtcggcgcgcgcgttcggtatcggttttatttttatttcgtttttcgttggttcgcgattaagcgcggttattgttcgcgacgtagttttcgttttttggcggttgtcgggttttagtagttgtaggttttgcggggttagcggcggcgagttgggtttttgggcgagggttattttcggggggtttgggtacgcgggcgagcgattgcgtaaggagcgcgttcggttcgtagttttttcgttttcggcgcgatttttcgttttttcgtttgttaagggtgggtttggggtagttttttttatatttgtaattcggtaattttttttttcgttcgattgatcgtttgttttttttggttcgtattttgtgttttgatttttcgttcgtattttttttaggtttttcggttgtttttttgtgttgtgtaggggacgcgcgattatttcgcgtttgtttcggtcgtcgttgtgtaacgtacggtttagcggattttgtatttttttagacgggggagggggcggggaggaggttgttttatcgtttcgtttagtaaatattagggattcgtgattatttgttcgttaagattcgcggcg

SEQ ID NO: 11224 - DNA, 2273 bp, synthetic construct
  misc_feature 1..2273: note = Description of Artificial Sequence: Synthetic polynucleotide
  source 1..2273: mol_type = other DNA
acgcggtggtattggtggttgtcggtagttgtcgtttgtagagtgggtgagatcgagtgtggtagatggtttggttcgcggtgttggaggggattggcggagtagaagcgttttggcgtcgggtttttgtttttttggagttggggtttggggaatggggtcggttattgtagggatagaggagagggtagggtaatgggtgcgtaggggttttttttaaaggttgcgggtggttaggggtgtgcgggggcgttgaggtgcggtcgtcgagagattttggtttttagggtggtcgggtttggtatggattttaggggatggtgtatatatcggatcggacgggttttttttttattttcggatttttcggttgggtagcggttagggagaggggcgatttacgggggcgggtgtggggacgtcggattacgcgttaggagttttagatgggtttagatttttatttttcgtttcgggtcgtagtgacgttagggttcggacgttttcggaacggttttttgggggcgttttagttttacggattcgtagggagttttcgtcgtaatttgtatggggtttatttgtatgatttcgtttcgcgcgggagtcgggggcgtcggcgattggaggagttattgttaatttttaggggaaagtgggcgaggcgatttttgggtcgtttattttattttattttttagttcgcgtcgtatttggggtttttttttatttacgtttcgttagggcggggtcgcgggcgtagatattcgcgggtatacgtacgacgacgcgtatacgcggtcgtacgcggtttttcgagttttttgcggcgatttcgatttattttcgcgggtgcggggcgcggattcgttcggtttagtttttgttttttaggcgtttttttttttcgcgatttgtttcggtcgtattcgttttcgttttagtacgcgacgttgttcggcgcgatttttgttttttcggtttagttttatcgttgttttcgatttaattttagttgaacgttcgtagttttagttttattttcggtttagttttagcgtttttagttttattttcggttttagttttagttttagcgtttttaggtttagttttagttttatttttagttttaatatttttaggtttattttcggttttagttttagttattttagttttagtttcggtttagttttagttttagcgttttcggtttcgggtttagttttagttttagttttagttgagtattttcggtttcgtttgttcggcgtttttttttgtgcggcgttttttcgttcgtattcgttcgattttttggaatttttcgcggacgtcggggtttttggaggcggttttttttgtttttgttttcgtttttttttcgcggcgttttcgttttttatttatttttttagtttcgcggggacgaggggagttggagggagttcgggattcggcgcggttttcgtaggcggcgtttttttttcgttttcgacgcggtcgttttttttgtttgttcgtttttatcgtcgttttcgtttttgtcggggacggggatagtagattttcggcgttcggttttcgcgtatttgtcgcgcgtatcgttttttcggtttgcgcggtttcgggggtttcgggaagatcgagcgttggcggttagttcggggaggttgtgggtagtaggggtggttgcgggtttttagtttttttttcgtttatttcggagtttatatttgggatttttatttcgggagaattttgttttttttttacgatgagtttggaggattggagtcgggatttggtatttttagggttgtgattgggtgaattttgagggtatagttgttgttcgtcgttttaggggttttaggatggggcgagtagttttgaagaggtttaagggtatttcgtgaggagtttttacgttttgagagtggggcgtagagtcggagtttcgggttatgttttcgttgtcgttggcgcgggatattcggtagtcgtttggcgtttttttgttggtgcgaggttttatggtgttttgtaacgtttgtttgattttgttggttatcgttacgttcggtttcgcggtgttgttgttttttaataattgtaggtggtcgcgggcggggcgtcgtattggttaagttttaatttcgaggtttttgtatatagaggttggaggtcgcggcgggttcgcggggttttcggtagtttttcggggatgggatgggttattttgcggatttttcggtttttggaggtcg

SEQ ID NO: 11225 - DNA, 5586 bp, synthetic construct
  misc_feature 1..5586: note = Description of Artificial Sequence: Synthetic polynucleotide
  source 1..5586: mol_type = other DNA
gcgtcggttgttggggttgttaggtgttaggagacgtttttttcgggtttgtttcggcgttcgtttttatcggcgtttgttttgtcgtttagttataggtttcgggttttttcggtagcgcggagttgacggtgggcgcggcggtcgtttgttttttggcgttggagggcgtcgacgtgagttatattaattatcgcggtcggagttcgttggatttggtcgtcgagggtcgcgtgtttaaggttttttagggttgcgtttagcgttttcggtgagttcgtggacggcggggatggggttcggcggttttcgggttttttttaagtcgttttttttttttgtagggagcggtaggcgggcgggggcgcggtttcgggttttaggtaaacgttcgggatttttaatatcgtgacgaatttgtacgtgggcgtcgcgtcggggttcgaggtcgttgagtgtttggtgtgtttcgagttggcgttgttggtgttgttttcgtcgtgttagtatcgtatcgtgtgtgagggtgagtggggggtttcggggtggggaggttcggttagtagggtcgtagttaatcgcgttttttttttcgtagagtgcgcgcgtaggatgaagaagtgtattaggtgttaggtggtcgttagtaagaaattgcgtttaggtgggtgaggttttgcgtttttaatacgttttttgtttagttggtggttcgcgggttttcgttttttatttttttttttttatattttcgtttatggtttttttttaggttatatttcgtttttttaaggtttatattcggttttttagtttttagtttttagttttgtttgttttagattatattcggtttatagtttcgttttaaggtaatattttttttttttattatattttagtttcgttggattttacggttttttttagattatattttttttatagttttattttagattatagtttatttagagtatcgtttttttattatatttcggtttagtttatagtttatttgtagttttgattttagttcgtatattattttatgtttgatttttacggtttattttttgttcgtattcgggttttatttttgtttttaaattatttatttcgttagttttttttgtaggttataattcgttttaggtgatatttcgtttttagtttcgttttttcgtagttttttgtttttcgtatttttttattcggttttttagtttatattcgttttttatttcgtagacggttttgaggtggcgagcgtcgttttcgttttcggttcgtcgcgttagttggtggaggagttgtagagtcgttatcggtagatggaggaacgtattatttgttttatttgtatcgatagttatattcgtttcgtgttttagtgcggttacggcgtatgcgttttttgcggtttcgcgtttagcgtttgttttatttgtcgttagtttattcgcgatcgtatttagattttcgtgtgagtcgcgtcgttcgtcgcgttcgagttgttttcgcgtgttttcgttttgtgttttataaaaagaaagattttcggacgttgtttttgttgtttgtttgggggatcgggcgtttttggggtttttttttcgggatacgcgggcgagtttgggggcgaggagggggggtttttttttgggttcgtttcgttcgttttaggttttcgggtttagattttcgttcggattgcggttttcgggttaggatattttttaggcgcgggtacggtcgtttttcgttttttaggttcgggttcgacggggcggggatttttgtgtttgttttcgggtttttttcgttttttcgttttgggggcggtcgcggggattcgcgttttgatttaaggggttcgatattttttagggttgtggggtttcgttttagtagggagttagttggggggcgttttaggtagggtttgggggtcgggcgtacgtaggcggggtgacgagttgggggggcggggggcggtgtcggagtaaatacggcggttaggtttagtttttcgcgttttttaagaatcgttcgcggtcgtcgttagttgtttggcgttgatttcgttggtcgggttgtcgttattttgggttcgacgtcggcgcggaaaacggggagggacgagatagatataggtcggtttggttcggaattttttgtttttttgtttaattttttattttcgtttcgcgggacgtcggtgttcggtttcggttttagtttagagtcgttcgcgtttggacgtcggtcgtttcgtcgaatttttgggttttcgagtttttcgttttcgtttttaattaggatcggtttagatttttaggttcggcgtttagtttcgtttttcgtttttttcgttttttttttttttttgttggggtttagtcggggatttaggagttatatattttttattttacgcgttattttttacggggtttttcgtagttagggttcgttttttttcggtttttcgggagattttggtaagtttttttttttcgtttcgtaatttggtatttttcgcggtttttgtttatttacgtatttttttttcgtttttttttttatcgttttatatttattgttacgtttttattcggttatttttttttagttttcggggatattgttaggcgagcgacgcgttttttgcggtttagtttagttgtttgggttaggatggagatttcgtttatgtggggtttaggggttttttgaggattttatttgggaaaaaagttattagattatttattgtttagtagtgggggtttggggatttttattgttatttttttttaagcgggagttttggcgttgtttttttcgggttgtttggggtttttttcgttttttttttcgaggatttcgtttagtaggttatgtttaggtttttgtttttggtttacgggacgcgggtttttatgttttcggttggagatagtaggtagttcggttaacggacgggttagttggttttttttaggggtagttttgttttttttttcgtttcgttttttttttttttattatatcgggttgtaattcgagtcgtcgagttattgtttttttttcggatttttttcggaggttttgcggttcgggttttcgcgttttgttgttttatgtagttttgagttttatagtaagtttgttatgggtcgcggggttcgtgttttttcggaggtttcgggggtaggcgtcgagcgtcgttggtttggagtcgcgttggtcgttttgtgtttttttttcgcgttggtgttgttggttcggttgggggtttcggcggtgtcggtttggagcgtagcgtaggtgagcggcgggggggaggttaggtgtcgggttgggggggtttttacgtttgtgggtttggtttatcggggggttcgtaggacgtgtgcggggtgtgcggggtgtttgagggttcggatgtgcgtttcgaggtcggagggttggacgtttttgtgtttagttgttgggaggggtgggaggtttcgttttgttgtttagtttttttttttttattgggtcgcgtttttagggacgtgtaatagggcgtttaggttaggagattcgaaattataggtagataggattcgttacgttcgtttttagttttgggtatttttattttcgtttttttttagtttatttttcgcggtagtttttggttttggggatcgttatcgatgttttttacgtacgtttttttttttgaagggagacgtcgttgcgttgggtttttcggcggttttttttattcgggtttcgggtttattggtttttcgtagacgtcgttatacgttgattttagttaggttgcgttgggattattttaattttatttataggtgcgttttggttgggtttcgggggagggggcgcggtcggcgttcgttgagtttattttttttgtaggattttttttttttcgcggaatttgttgagttcgcgggagacgcggcgggttttagttgtcgtttttcgtatgtggagcgacgtgtttttttttagttttcgcgaggtggttttcgagtagtttagcgattttcggataggtgggcgttcgttttcgtttcggttcggttttgcgcgttcggttttttagtttcgtgttttttttaggtttttattcgattaattatacggattgtttggttttcgcgttgtattattgtttcgacggttttacgggggagttggtttacgttttttttttttcgtacggcggtatttatttcgacgatagcgagtattgggttttgggttttacgcgttatagttggaagaaaggtgatcgtttaggttggttttttggaggttttttttttgtagtatagtgggttgtcgcggtcgggttttggggtagacggtaggagggatttttcggggtggtggttgttattggagtttagtaggtaaggaggggagttcgtgggagtttttatttcggtagttttgaatttttttttttatttttttgcgtttttggagcgggagttggagttgtatttttgggggtcgagtttatcgtttgggtttagaatatttttattttttcgtggttgcggtcgagggcggtttcgcggttgcgttttagtagatatatcgggtttcggggagttggtttacgggcggcggggttgggttcggggtttttaggcgttgattttcggggttcgtaggcgtgtggtttacggatttggtgtacgtggcggtttacgagatcggttacgcgttgggtttgatgtatttataatacggtcgggcgtttatgtatttgaacgttacgttgcgcggttggaaggcgttgttttaggacgagttgtgggggttgtatcggttttacggtgagtttttttgtcgggcgggagggcggggatcgggcggttttgagttaggtcgtgttttttacgttttcgataggatgtttcgataggttgttcgtgtgcgcgttttgggcgcggaggggtttttgcgacgttcgtcggcggtttatgaagaggttttgttttagtagttgcgatttttgttacggtgatgtttacggggtcgggatagggttgcgtgggagttgggttttggttatggtcggggttgagggggtattgacggggtttttttttttattcggagtagaattttttttttttacggtggttattattttatcgttttttaggattaaaattaggttggtgttcgagggtaggaacgtgatttttcgttgcggttagaagattttttataagaaagggaaagtgtagtgagtgagcgtttcgggcggttttcggggtgggtagttcgcgggcggttttggggtaggggtgcggggtaggtagcggggggggttgtgtttgtaggagacgtttcgtttttttgtagttggtataaggattaggagtttttggagtttttttatttcggttatttggttttgggcgaggcgtatttgagtattatcgttaacgtcgttaatgagggtatttatatttgcgtggtgcgtcgttagtagcgcgtgttgattatttatttttggcgagttcgtgtgcggggttgagttcg

SEQ ID NO: 11226 - DNA, 1264 bp, synthetic construct
  misc_feature 1..1264: note = Description of Artificial Sequence: Synthetic polynucleotide
  source 1..1264: mol_type = other DNA
gcgcggttcgggcgtagtttcggcgtagttttcgcgtcgagcggtttcgcgtttcgtattagtttttgttcggtttcgggtgacgtcgtatttttcgattggattacgcggtttggggggcggggtttggttcggtgagtttatcgtcgcgtttcgttattggttcgggcggcgtattcgggtagtggcggggagatcgcggtattcggagtttcgcgagtcgttttagttgcggcgagtggagttgagcgggcgcggggtcgggttgggtcgggtcgggcggggtcgggcggggcgcgggagttagtgagcggcggttcggcgtaagtttgacgagtaggagtcgagtttagtaggttcgggtaggtgcgcggcggcgcggggttaggcggagggcgcgtgcggtcgagggcggcggttggcgggggcgcgcgcggggcgggggcggggtcggggcgtggggatacgcgtgttcgcgggtcgggggcgtggtgcgcggttacgcgtgtttttggcgcgagtgtgcggggttaggtcgggagggcgtgcgcggatcgggcgtgtttacgcgcggtagggaggggttacgagggtgcgcgcgtttttggcgcgagtgggaagtgtggggattcggcgggttcggtgtgaggggcgtgtttttggggcgagagtggggagtgagtgtgaggagtaagggtgaggggttgtagggaggggtgcgtttggtcgaggagtgggtgggagatacgcgtgtttatgtcgcgagggtgtgtcgacgttcgagtttgcgtggggttcggggtcgtgtgtttggagtggtcgagggcgtgaggggcgcgcgtgtttgtgcgaggggcgtgtgcggcgggtgtgagttacgcgtgtttgggtgcgcgcgcgggtcggatgagtttttggagtggtgcgaggacgcgcgcgtgtgtttgtgttggagcgagggcggggacgagcgtgtcgggcgcgcgcgggcggggttggggcggcgtcggggcgcgcgggggttcggttcggtcggcggcgagtgtgttggggcgttcggtttttttttaatacgggtttttgggatttagtgtcgtttttttttcgcggcggggttcgcggagttttcggtttttttgggtagataggtgcgaggcgaggtgcgggtatagttttgcgttttttagcgggtgcgggatcgggcgacgggggattgtttttaattatagattaggggagcggagggacgttcgatttattcgcg

SEQ ID NO: 11227 - DNA, 716 bp, synthetic construct
  misc_feature 1..716: note = Description of Artificial Sequence: Synthetic polynucleotide
  source 1..716: mol_type = other DNA
tcgttttcgcggggcgggaatttcgcgtttttttttttcgagttttattttttatggtaaagcggcgtggggcggcggggcggagggagtcgagggggcggggagggcggacgggcggaggggacgggaggtttagcggtttcgggtttcgttggttcgggcgtcggatcggagtcgtcggggcgcgggcggtttaggtaagcgggtcgggtgggtgggggtcgcgttttttcgtttttgttttcggtgtatataggtgatagcgtcggtagtgttcggtcggagtttgttcggtcgttagtcgggattttcggcgcggcgtttttggaggggtttgcgggtggggggtgcggtttttacgttttttgcgttttagttttttggttttttttttcggagtcggggagtcggtaggttcggggcgagggtttagtgaggtcggcggagggtcgagttttagttcgggagcgggagtcggggattcggcgcgtagggcggaagttttcgtataaaaggtcggagtttcgtatatggatcgaattaaagtttcggcggcgtttagcggtgatttcggcggtcgttttgttcggttgtttgcggagggtttcgcgttttcggagttcgggggcgttttaggtttttttttttagttagggttaggtaaggggagggacgggtttcggggttgtttttttttgggttttacgcgttcgtcg

SEQ ID NO: 11228 - DNA, 619 bp, synthetic construct
  misc_feature 1..619: note = Description of Artificial Sequence: Synthetic polynucleotide
  source 1..619: mol_type = other DNA
tcgttcgggattcggggggaggcgcgttgggtggttcggtagtcgggggcgggcggtagtttgtaggcgtaattggtatgtacgtcgttgtagttgagatcgtttaataaagtattatatattttatcgtttttatattttattattttacgcggagtttgtgagagggttttaatgggagttagttgtgtttttattttttgttgtcggtcgggacgggtttttttgcggattttttgaaatgaaataatgtgatgtacgtcgcgataagggtcggtttgtaatgaggtttaggtcgtcgggcggttgttattgttttaggtgtcgcgtatttgggttgcgaggataaggaggaggagggggcggcgtcggaggatcgggggggagggggaagtcgcgaggggtagggggtgggagaaggcggagggaggaggtagggggtagggggcgggcggaagaggggaggaaggagggggcggcgggtcgcggtaggttaggcgggagaagtcggagatagagagaggacggggatagtggcggtttgtagagttttaggaattcgggtttaaattttgttcgttagcgtgagagagcgtttgttcgtttaggcggtttatcg

SEQ ID NO: 11229 - DNA, 293 bp, synthetic construct
  misc_feature 1..293: note = Description of Artificial Sequence: Synthetic polynucleotide
  source 1..293: mol_type = other DNA
gcggtttcggtaggggttgttgcggcgatttaggttgttgcggttttagttttattagttgttgttgttttttaaggagacgtcgtcgatagcggagtagtggttgttgttgttgcgggggcggtagttagaggttttagcgttttaataatcggagtttaggatgttgtttcggttgttgagaggttcgtaatttttagcgttgcgttagagaaattcgtttagtttagagcgggttcgtttcgttgcggtttttacgcggggttgggtttcggagtttgtttcgtaaagcg

SEQ ID NO: 11230 - DNA, 2748 bp, synthetic construct
  misc_feature 1..2748: note = Description of Artificial Sequence: Synthetic polynucleotide
  source 1..2748: mol_type = other DNA
acggtagggggttttcgtgtttttcgagaatttaagaattcgtttcgtttttacgcggaaagttgggagaaaaattgttttttttttatttttttttattttttatttattcgtttttggagtttcgttcgtagatatttttttttttcgagttagaaatagatatattattttttttttattttttttttcgtgcgtatattcgtttttttttttttgtttgtttttcgtttttttttttttttttttttttgttcggagttgtagtttgtagtttcgattcgggttggttggttggttgagtgcggtcggggcgttgttcggtagtgcggtgtttacgggattgataggtaggtaggtcgcgggttgggattcggatattaaagtaaaagtatcgttgggcgtcggaggagtcgcggggtttttattttttttttgattgatttttaaattttaatttgtatttttttcgtcgtttcgttttttttttttcgatttcgttttatcgtttttcggtttttttgtttttttttttttttcggttttttttttcgcgttttttttttttgcgttttcggtttgttttttttttttttttttcgtttttttttttttttttttttttttttttcggtttttttcgttttttttttttttttttttttttttcgttttttttttttgcgttttcgttttttgtttttttttttcgtgtttgtagacgcgcggatcgtttatgcgtttttcgcgggtagaatgttgggtagtagcgttaagagcgtgtagttcgaggtggagttgagtagcggcggcggcgacgagggcgcggacgaatcgcggggcgtcggtaggaaggcggtagcggcggacggtagaggtatgttgtttaagcgcgttaaggcgttcggcggcggcggcggtatggttaaggttagcgcggttgagttgaaggtttttaagttcggtagcgtggatagtcgtgttttcggcgggtcgttcgtttttaatttgcgtaagtagaagttatttattaatttttttttttttacggatttcgagaaaaagttgtagttttatgagttcgaatggagcgacgatatggttaaggcgtttaaaggtttaggtaaggtggggtttaagggtcgtgaagtttcgttgatgtttaagacgttgtttaagtcggagtattcgtttttttaggttaagggtagttcggcgggcggcgttaagatttttttggtttcgttcgcgtttaatttgggaaagtcgagtcggatttttcgaggattttatgcggaggttaagtcgtttagtaaggcgtttgaagcggtcgtgagcgaagatggtaaatcggacgacgagttgttttttagtaaggttaaggcgtaaaagagttttgggtttgttttttttgttaagggttaggaggagcgcgttttttttaaggtggatttcgagttggtggtgatcgtgttgggagatttggagtagttgttttttagttagatgttgggtaagttttgtcgtttcgtttcgtttcgtttttggtttttttttaattagttgttggggaaggtgtggggaaagcgaagttttttttttttgcgttttttcggagggtttttttgtttacgattaggttgtgatgggtattgcgtttagatgtgttgagttggtttatttttagatgcgtatggtttaagtgtatttttttaaagatattataggcgggaattcgggttcgattttggtttgttcgaggtgaggttggataatgggatggggggtgagggggttataggtttttagaaatagagttagaattttaatatggtaaaatttgggattggtggaaattttcgttgtggtgtggtttgcgtttgataggagtatttcgtattgtaaggggagcgtttagcgagagttcggatttagaggatagatgtgggagagtagatgtgagggttgattggtttcggaatatagttgaggttttattttttttgtggatttcgagtgggagcgtaagtcggattttttcgcggtgtgaggattttggttaaaagaagcgtttagggtcgggggcgggcgggttgttagttgtgcgtatttgggcgtatgttcgatattttagtttcggttttggttttaatttttatattcgtaggttttttagggcgtgtcgaaagttttgggcgttagcgtcgagatttttgtttgatcgggaagtttttgttttgtggttaatggaagtcgagtaggcgggaagggaggaataaagtttgttcgagtggaggaagcgcgtagagttgttttattgtttttcgtgtttgaagagtttatgtaaaaaaattcgaagcgggtttcggaattgtttttttttttttcggagagtttttgtttttagagaggaatagatttgggatgtgtcggacgttaggcggttatgtttcgggaattggtacgggtttttttggggttacggaataaggacggtggggtttggtgtttaggcgagttgttttggttgcgcggatttgttgcggtggttgggttgtgggtttttcggcgtcgagggattcgagttttttgggtattcggtaggttgttcgttcgttgggggttgggaaggggcgtgttaatgcgcgtgtgaaagggcggggtcgagtgacgggtttggcgggtggggaatatgtaagagttcgtcgggcggttttggagaatgcgaagtcggaggagatcggttcg

SEQ ID NO: 11231 - DNA, 433 bp, synthetic construct
  misc_feature 1..433: note = Description of Artificial Sequence: Synthetic polynucleotide
  source 1..433: mol_type = other DNA
tcgtttcggcgtttttatcgtcgtcgtcgtcgtttaatagagtttttggggcggtttttatcgacggtgtagttcgtcgggatcgggaggaagtagttgcggttatcgcgtcgtgcgttcgcgttcggtcgttaggtgttttagtagttcgatcgtcgagatgtttagttcgtcggggtttcgggcgttatggttttgcgtcgcgttgtgcgtttttcggagggtcggcggcgttttttagttcggttcggggtttatcgtttgttcggttttttgttattgttaggaggacggtattatgttgtttgtcgattgttttgagttcgggttgttcgtcgtttcgggggatttggattttttgacggtttatttgtgagtattgttcgtttgttttcgtttggttttgcgggttgttggttagcgtttagtttcg

SEQ ID NO: 11232 - DNA, 1376 bp, synthetic construct
  misc_feature 1..1376: note = Description of Artificial Sequence: Synthetic polynucleotide
  source 1..1376: mol_type = other DNA
tcggtatcggggttgtatttttgggtagacgttgtatgtttgtttttaggcgcggttttgttgttatttttttgggggttcggagcgcgatagtagtttggggacgtttttcgcgtttagtacggtgtatttgggttttgaggttttggtcgaaacgcgttaagttgggggtaggtgtagcgattttatatttttcggttgcgcgttttggcggtaggaggcggggtcgggggcggggcgtgagttggtcggggcggggtttatggaggggcgggatcgcggcgttttataagtattgcggagcgaggcgcgcgttcggttagagagcgagcgcgtaacggcggcgacggcggcgattttatcgcgtattttgttaggttttcggcgtttagcgttttacgcgttttcgcgttttcgcgttttcgcgttttttttttcgcgttttcgtttttcggttcgttaggtttttttgtcggttattcgttaggtttcgcgtcggttcgttcgtcgtttaggatcggttcgcgtttcgtaggtcgttcgtcgttcgcgtcgttatgggagtggagggttgtattaagtgtattaagtatttgtttttcgtttttaatttcgttttttgggtaagggttgcgtcgggggtcggggcgggagggggtaggtatatattttacgttgggtaggtttcgcggtagcgtgttaggtttcgcgggcgtagcgcgggtcgcgaagttgtggggttatttgtgggttttaggagcggggtggggggtcgttcggggttatcgcgtttttcgatattggggttgagggttgcgagtcgagtttcggggtttttgtgttcgggggtttatttttgcggtcgggtcggggtttttgggggtcgtcgggtagttttcgttgtggtggtgatgggtgcggtggtcgcgggtcgggattcgagtattcggtcgttttttagttaaggaggggtttgcgcgggtttttggtcgcggatttcggattgttgtttcgcggggacgaggggggggttcgcgggcgggatttttggcgtttcgtttttatgagtttattaagagtcgtcgtttttggatggtggggcgggggcgtatattttgtcggaggttgggggcgattcgttttattttttttttagtttagtttattttttaatttgcggttattattcgagatttttttgggggtcgcgtttaaaaggagcgtagattttcgtcgggatggtttagaagttggggtgcgcgtattttggtcgtttttgtttgggagtcgatttttttttttttatttagatacgttttagcggaggtttttttttagaagggttttggaggtttcgtaggagtggggatttcgcg

SEQ ID NO: 11233 - DNA, 3393 bp, synthetic construct
  misc_feature 1..3393: note = Description of Artificial Sequence: Synthetic polynucleotide
  source 1..3393: mol_type = other DNA
gcgggtgtatagggagcgttaggattttagcgttttgtcggattagatttatacgttcgaggtgatgtttattattaggtatatgaagtatttgagtatgaagacggcgtagtcgggtttgcgtgtttggtcgggttgtaggtttcgtaggtacgggtagttgtgcgtggttttttagcgcgggcggttgtgttgttcgtagaagaggtaggcgattattatcgcggcgggtacggtgtagagtacggtgaataggtttaggcggattattagtttttttagtttgtgcgttttggtggggtcgttttgttgtttgatgatcgagcggatgcggaagagggatacgaagtcggttagtaggaatatggtgtcgatgaagaggtagatgattagcggcgttagtacgaagtcgcgtaggttgtttaggttttggttgtttacgtagtagatgttcgttatcgggtcgtcgtttatcgagttgagcgttagtatcgcgatggatttgacgttgggtataagttacgcggttaggtggaagtattgcgagtagtcggcgatggtttcgttgttttattttatatcggtcgttaggaattatgtgagcgataagattatttattagatggagttggttatgtcgaagaagtagattagtaagaagattacggtgtatagcgcggggtcggtggtttcgtagcgtacgtgttgttttatcgcgtttagtttttcgtattcgtcgcgttcgttcgggtcgttcgcgttcgcgttcgtcgcgttcgcgttcgtcgtcgcgtcgttcgcgtttttagcgtttttcgcgttcggcgcgttatcgttgtacgttattttttcgtggttcgttattaggcgtattaggtagtttatcgatacgaagaggtagtaggtcgagaggaagataatgggtcgtttcgggtatttgaagcgttttatgtcgataaggaaggtggagacggtggcgaaggtggatacgaagtagagtatcgattataggtcgatttagaagacggtgaaggcgcgttcgttttggttgaaaaaggggttgtggtagggtagcgcgtagttagcgatttggtttgttttgacgcggttgtagagcgggtggcgttcgttggatacgtttattataggcgcgcggtattggtattcgggttcgtagggagtcgcgtcgtcgttagggggtcgcgttttttcgttatcgtcgtcgtcgcgagttgggggcgtcgtcgcgttttcgtcgttatcgtttttgtcgtcgtcgtggtgcgggggtttggttttcggcgggcggtcgtggtcgttgttcgaaggcggttgttcgtcgggcggcggcggcggtaggcggcgcggcgggttgggcgcggcggtggttaggtcggtgcggttgtagtttatgtatagcgtgttagggttgttttgttcgggtagtcggtcgtagcgtatgcggtcgggttaggcgaagtcgtattggcgtatgagcggcgcgtagtcggttttggcgcgttcgtatatcgagcggtagggcggtagcggttttttgtagttttttaggtagatgggcgtgtatatgttgtataggaagaatttgagatcgggcgagtattggatttttattagcggttagaattggtgtatttttaggttcgtttcgttttgcgtgtcgtggttgaattgattgggtatgtaggtgtagttgtagtcgatgtttttatatagcggtacggtgattttttggtatgttagttttttggtcgaggcggtcgtagcgtcgttagagcgttgtagtagcgttaaggcggttagtagcgaggttatttttaataggtaattttattttatgttgtgcgtttcggttcggtgttttcgttttttaggcggcgcgtagaggggtgtcggggggggggtttacgagagagtcgtagacgggtatagcgggtgatttggggttttttttatgtttcgttcgggaggggggtttgtcgataatttaattttttttaggggcgcgttcgtagcggcgcggttcgtagtttgggtagggttttttcgtattttttttcgtcgtttcgggggtttgaaggcggttgtaggcgcgcgttatagttcgtaggttcgttttgttggtttcgggtcgcgtttagttttcgcggcgtagagcggtcgggtttcggtttatcgtttcgcgttcgttcgtttttttttcgcgcgttcgattattttttttcgtcgcgtcgggcggcggtgatttcgtcggatagagagggcggaggcgtcgtaagttttttttggggtcgcggtgcgtagttaagatggttgggtcgggtcgtttgtcgcgtcgggttagttttggcggttattattcggttttcgggggtttatgttcgtttttaaggttaagtcgtcgtcgtcgtcgtcggagttggggattcgtttcggtttaggtcgtcgtttttttttttcggcgttcgtttttcgttcgttcgtcgtcgggatagacggattttcgtcgtttggaaaagttagcgtcgcgtttcggtcgtagtcgggcgaggtgtatatagttttttttttgttggatatttaggagtaaatttagatcggaaggcggagcggatatttgagtggcgcggttcgcgtttagtcgtcgtttttttttcggcgggagtagcgtttttagtttaatttttcggttttagtttcgttcgcgtcgcgttgtcggtttatgaatatttatatagcgcggattcggttttcgtttttagtttcgcgagttaatcgtcgggcggtagggcggagtttacgcgtttttagggtttagttttttttaaggtagttttcgagtgttcgtattgttgtgcgcgttttttgcggatggagagttttggtaattttgggattgatcgtagagatagagtgttggttatggttgtttttatggcgttgagtgcgtcggaggttttggtttttttatttcgagtttgtttttggggatagggacggggtttggtgtagcgcgcgttttttcggcgcgttttaaattagttaagtttttgttgttatttttcgtaaatgtgggtgatttgtaggcggttggggtttcgtgtttttcggggcggtaggaaggtttcgtagtaggcgagcgtcggggaggtttgtcggggttcggcgttgtagaagattcgggaaagggtgttttttttggggtttttagaacgatggtttttgagatttggagatgtggggggtgtggagttattttaaattggggttggattcgggacggttcgggtgagatgtttcggagtttagttttgggcgcgcgaggggcgcgggggataaatgttcgttagagatttttttttcgttttcgttgcg

SEQ ID NO: 11234 - DNA, 1381 bp, synthetic construct
  misc_feature 1..1381: note = Description of Artificial Sequence: Synthetic polynucleotide
  source 1..1381: mol_type = other DNA
tcgcggtagcgttagttgtatttttttttaaaaatcggaggaaggagtttgggggttaggtcggggcggtttgtaggtgtgaatatttcggaagtttttggcgttttggtttttaagagtatatttgcggttgtttacgggttttacgttttgcgatagttatttcgtggtttcgggggttttaagggcggtttttcgtatcggggttttaggtagcggaatttttttttagggtttatttataaagcgtggtgtcgtagagttttttacggaggggttttagtttggagttcgggtatcgtttatttttaattcgtcgttagtttcggattttttcgcgtttgtttcgtattacggagtcgggtttttagagtagtaaggttattaggtggcggtgttggcgtagtaggcggagcgtcgggtgcgcggggtcgcgtttttggttttcgaaggtgatgaagatgggtttgcgggtgagttttagtagtcggtataggttttttttgcggggcgggatcgttaggggggtgggtgttacgttggggtttatttaatttcgcgcgggatttatcggaagttgtggttgtattaggttcggtttaggaaggcgttcgaaagtattacgatgaggcgtcggtagcggtttaggtttattaagaggtcggcggagggttttgcgggagggcgggcgtcggcggcgtaggggcgggggcgggggagggcggggtcggaggtttaggggcggtgtcggacgtagagttttaagggaggggcggggtttgcggggtgggcgggtttttgaggcggggtttcgggtgggcggggatgggggcggagttcgatggtgggggtggggtttcgggtgggacggagtatggggcggggcggggcgggtttttcgggtgggcggggtacggggtggggttcgggatattagcgcgcggtaggaggtcgcggtcgtttaggaagagtttgtagtttcgacgtcgttttagttgcggttttaggatgaagtttacgaatttgcggttttcggggtagtcgttgtaggagacgtaggcgtcgtagagtttttcgtttgcggacggcggttagttatttcgatggttttcgaggttttatattagttttcggggtttttaatatttttaattattttttacgtgtataggggtagattcgtttcggattttaattttagtcgggtcgtatagagtattcgggggttaattttttttcgtcgtacgtttttaaagtcgagtttagtagcgtatttttagggaggtcgtggcgattttttttcgcgtttacgcgggttttacgtatcgtttatttttatttttttatacgcgttttggtattagagtagtacgttgagacg

SEQ ID NO: 11235 - DNA, 493 bp, synthetic construct
  misc_feature 1..493: note = Description of Artificial Sequence: Synthetic polynucleotide
  source 1..493: mol_type = other DNA
tcggattcgggggaaatggggtattaacggttgggttttaggagatattcggaggggttcgcgggttcggttcggttttttcgttggggggttattagtcggtcggtagcgagatatttagaggttcgtttttttatcgcgttgttatagtaacggtttggtcggttgcgtttcgggtcgttcgttttatttcgcgggttcgttttgagttagtgattttagggattatttatcgcggtcggcggattggcgggttttcgataggtgcgtatattcggcgtaggttgtcgttgagttcggaattttgtatcgggagaaattttttagttcgtagagtaatcgtagggtagtggacgggggtcgcgcgaggataaatagcggcggcgggtgtaaagttttttttttaagtcgcggggttggtcgggaggtgtcggttgtataacggcgtttacgtgatttaggtgtagttttaggcgcgtttaagggtagttcg

SEQ ID NO: 11236 - DNA, 922 bp, synthetic construct
  misc_feature 1..922: note = Description of Artificial Sequence: Synthetic polynucleotide
  source 1..922: mol_type = other DNA
tcgcgggcgttttgtagggatggagattgagagaggttagggattcggtttttttgggaaaacgcgcgggcgttttagtttttcgttttgcggtattttatttgttttcgaggattatcgttaagaagaggtttcgtcgtgttattgatattttatttcgttttttttcgcgaggtgttttcgagttttcgaggacgcggaacgtcggggtttttcgtcgggtaagtattagtatttagatttcgtacgtagttttgtatttttacgttttttagggaacgtcggttcgttcgttttcgggatttttcgttttttaagttaaggttttttaagtttagtgttcgcgcgttattttttttttcgattttgcggcgggatttttattttcgtattttttcgcggggttggttaagtttttagattttttgcgttgtagtcggttcggaaagttatttttaggttattttttcgcgcgcgcgcggcggcggttacggtggcggcggttgcgattcgaacgggtttttttatgtatcgcgtagggtagaggagggagcggcgtttcgtacgtcggggttggggcgttgggtagggcgggcgggcgtggggtttcgggttttttcgtatttagtcgcgcgagtcgggttttcgggtttaggggaggggagttgaggggcggagttatcggggcgcgttttcgcggttgcgttttttttcgtcggggagcgcgggtacgtaattcggagggtgttgggtcggttcggagtacgcgagtagcgggaggagggatcggggaatgattgacggaggcgggtcgtagaggtcgttgtgtttcgtcggttcgtattcggtcggagtgtgcgcgcgtagtttgttagattagcggcgggggtacgggtcgtattaagtgacggaggggggtacg

SEQ ID NO: 11237 - DNA, 719 bp, synthetic construct
  misc_feature 1..719: note = Description of Artificial Sequence: Synthetic polynucleotide
  source 1..719: mol_type = other DNA
tcgtttttttggtatttacggcgtttttgtttgtttttgttcgggtttcggaggcgcgaatattattttaagtttgcgatcgcgcggtattattttcgttttttttttttttttatttcgttttttttatttttttcgggagtttttgggagtcgggtcgtcgtgtgcgtaagcgtgtttagtttttttttcgtttttaattcgggttcgggttttcgttttttttgtaggcggattcgttcgtttttaggtcggattcgcgttcgggatagggattcggtcgagtcgagtcgtcgcgttagcgttgcgtcgtcggtcggtgcgtttagcggatcggagttgcgcgcggaatcgtgttgtttcgtttcgttttattcgtgagggtgagtacgcggcggcggtgcgcgggggtttgcggggcggggcggggcggggagtcgcggggttttcggtcgtttgattttagtcggcgtcgcgtttttcggagggggtcgggttttgtacgtgggcgtagcgcgggtcggggtggggttgttatagttttgcggagttgtttttcggggtttttttttttggattagattttcgcgggaagtcggatttttttcgtttttttggagtgagtaagcgggatagttttgcggaaagttttcgtttttaattttttagttttgcgttcggattgaagcggcggtttttatttttagtattttcgagcg

SEQ ID NO: 11238 - DNA, 958 bp, synthetic construct
  misc_feature 1..958: note = Description of Artificial Sequence: Synthetic polynucleotide
  source 1..958: mol_type = other DNA
tcgcgttgttagtatttcgtatagttcgttcgaaatattagggaaggggttcgtaggtgtgggggtggggtggcgaggttaggtagtttggcgcgagggagagagtcgaggtttgggttaggaaggtttttgggtgtcgtgtgggcgtagagtttaggagagcgtattgttaggttcggattttttcgtttttatttcgggaagaggttcgttcgtcgtagggggaaggcgggattatagtatttcggaggagcggtcggttcgggtatgcgggcggcggggcggggagggaggttttcggaatttcgagagagtattcgtgtttcgcgggtttcgtgtttcgttttcgggtttttttttttttaacgtaggggatttagttcggggtagtgtcgggtattggcgttggcgtttcgtttagttttgcgattttttttcgtttcgttttttttcgtttcgtttcgttttttttcgtttcgttttcgggtcgtttcgtttcgtaggttcgttattttcgggtaggtttcgttttttgttttcgttggcggcggcggcggcggcggtgtcggagcgcgagtagagcggagatttttaggttttgcgggcgcggtgagtgcggttcgggcggcgggcggcgaggcgggtttcgagagcgtgcggagtcgcgcggttttgagtcggcgtcgggcgggttgggtatttttaggtcgagattcgagaagggggagcggtcgggggcgtttacgggaggtagtgtgggtagggcggcggtgggacgagaggacgaggaatagagtaggcgtcgtgcgggaagcgggtcgggaaggggagggtgggtgcggggttcgggtatcgagcgaagtggggttttttaggggatggtttcgaggaagatcgttttagaaagggagtaattcggggtcggtaagggttttcgattgtgtgatttcgtgtatcg

SEQ ID NO: 11239 - DNA, 3843 bp, synthetic construct
  misc_feature 1..3843: note = Description of Artificial Sequence: Synthetic polynucleotide
  source 1..3843: mol_type = other DNA
tcgtaattttgacgagaagggttttttcgttgaaagtttaattgtagagcgttcggagcgcgttgtgagttcgtaggaacgcggtcgggtcggggacgggagaaaggcgcggtcgggattttgtattgtgtcgcgcggcgtttgcggttggaatttggtttggaacgcggttttttcggttttagtttttcgtttaggtttcgtttattcggtcgtttcgttggttcgtatcgttgtttcggttatcgaggagtttaaagttggcggcgtttcgcggatttcggcggagagcgcgagggagtcgcggtcgatttttgtattacgaagataattggaggtcggcgggggaggcgggttacgaggggttggggcgagggagttgggatgcgcgggttcggttcgtcgggaaataggttgtcgcggagtttcgttttttttttttttgcggttttcgtcgcgatttgattttcgttttgttcggggagttaatttagtcgttttcggggcgttttttttttttttggatttttacggttggattagagtttttttggtagtcgggttaaaggtttttttagtaaggttaaggcgcggtcggttggtatttggggatttttttttagtcgagtattggttttttaatcgtattgttaaggattatggtagcggtaggaaattcgaagggttttataggtttgcgggagggaggatttattttatagtaaggaatagatttagatagatcggggattttagtgggaggggacgagaggttttaggacgttggaatgtggtaaaaataaaatattttttatttatgtatattattattttttgattgcgggttggggggaagggagtttagggttaatgtgttttagattttagcgttttttacggttgtgttagggttggggtggtttatttttttatagacgaaaattaagatttaaaagtatatttttattgtggtttttttattaaagtttattaacgtgatatataggttgcggcgttggagggaagcggcgaaacggggagaataaacgtaatagaagtaaattgttgtttgtagaggcgagaggcgaaggaacggaagttatattcgattttagttttatttcgtttttattagcgtcgggttagcgtaggaaattaggaataggtgtaggtaagggtggtagttcggtagagttagcgttttattttttttaatttttcgttagcgtgggtttggatggttgggttgtttgggtatttttaagggggattaggtatcgcgggtaggtttttaaatacgtgaagggtatagggtttgaaagataaggaggggcgtttaggaagggcggaaaagaggggttttggggttttttaggatattaagttagtttttgaaaacggcgttttttggaaggttttttaatattttcgagggaagatttggagttttgaagatttaatgaaattttagttttgattgattttttttttgcgattaatttcggatgtttttatttagtttttgtttcggtaatcggttttttggggatagtagtattagtattcgacgtttatcgtataagtgggcgtcgtggtgcgaggcgtattttagttatttaggtcggggtgggggcgtttcggtatttatattttttaagtaggtaaatttttaggtttgtttttcgagaatcgggagttcgtattatagtttcgggtaattatcgaggtagtttatgtaattgttcgcgatgtcgtttagtagatttttttttttattcggttttagagtttagtatatgggtatttttttttttttattttttatttcggcgattggaatttcgagtttgttttattatcgttttttataaagtagcggggtgatttcgtgtgttataaatattaagttagtatgtaggtttaggtaaaattttggttgtttttttgcgttttttttattgcgtcgatggtttatagataattgtatttttataaattttttttttacggttagggggtgggagggagttagagatcgggtgggggtttggcgcggtattgttgagggttttgtatttaattgagtagtaatatatttatttatatggacgcgggtgtataaatcgttttaatattttgttttgaaagcggagttaatttttaaagttaaggattacgtagttgaatttttagtattttttaatttcgtttaggcgggggtaggtagagaaggggcgggtagcgggtagttaattcgttcgattttttcgttaagaaggatttattaggtgaatttttcgttttttatttaagtagttggttgtgtatttttcggttgcgtgtgtgtgtttatatatatatatatatatatatatatatgtcgttttattattttttagtttgtttttttaatgtaacgatcgtatttaaaaatggtaattaaaatgattgaggagttcggtgattatattttaatttagagtatatttttcgaagttgggggtgagagtagttatatagttatatttatattcgggagttttttaagcgtttatttggcggttgtagttttagttggtttttagacgaatattaatatcgcggtcgggcgttcggtgaggagaggcgggcgtttcgcgggttgtagagggcgaggagttggggtcgtatttttaggatttgagttttaattatcgttcgtgcggggttgttgtagtcggtatttgtttcgtagggtaggttgtagtcgttgaagttcggcgtcgtttcgcgggtttttttagcgttcgacgggggtttggggcgagttagtttgtagaggggttgtaggcgatcgggtcggggcggggaacgggattcgggagaggtagacgaatttggggcgcgtcgttttttttttattcgttttttatttttttgtttttttttaatttttgtttttaggttttagttcgcggcgggtttcgggggttgcggcggttttaggttttagaatagtttgttttttcggttattcgcgttttagtttttttttttttgggttaggggagtaagtaaatatttttcggagttttcggtagtcgcgtgagttattcgaattttgttcgggttagtagtgtagagggcgatggagttggcgaggcgtcgtcgcggtttttaaggcgttttttcgtagagcggattacgtcgttttatcgtggttgtaggttgttatcgtcggggaagcggcgaggacggcggtagggaggtaaggcgtcgcgtcggtggtttttttttttttcggcggcgcggtttttttgtttcgcgagtcgtagcggggcgtttaggaaggagtaggttcgggttttgcgtttagttttagcgagattaataatagttttcgcggggagcggagttttagcgagtttttagtcgcgcgcgtacgatcggttttcgttttcggtcgttttcggtcggcgtttttgttagtattgttgttttatatgaaatagttgtaatttcgaggtttttggggggttggggcgggtgtgtgcgcgcgcgtgtgtgagtgtgtgtgtgtgtgtgtgtgtttaatagtttttttttttttttttttttttttgtttgttcgtttgtttgttttcgttttttattttcgtttttttatatatagaaagagagggcgagcgagagagagatatatatatatacgtatacgtatacgtaggttatatgaatgggaggcggtagttaattttacgaggtcggcgagtcgcgcggcgtattggcgttgggagtagggtcgtatttcggcgcgggggggcgttacgtaggtgatgggcgttttttcgggggttacgcgcg

SEQ ID NO: 11240 - DNA, 384 bp, synthetic construct
  misc_feature 1..384: note = Description of Artificial Sequence: Synthetic polynucleotide
  source 1..384: mol_type = other DNA
tcggaagtcggggggcgggtttttatagttattgttcgttattagttcgttattgtgtttatatagggtgatttgatttcgaggcggtggaggagggaataattttagagagtatattttgtcggttcgtaggacgtttgtagtcggtaaatttttggtcggaacggtatagatcgtattttcgtaattcggttttcgggttagattcgtatgcggacgggtatcgtaagggataaacggcgaggcggaatttaacggaagtgaagaaaagattaacgggaaagaaggacgagtacgcggtttcgggatagatttttaaagtttttttttgcgttttttggcggtcggagggggagtagcgcggatacgtttttcggttaatcg

SEQ ID NO: 11241 - DNA, 1432 bp, synthetic construct
  misc_feature 1..1432: note = Description of Artificial Sequence: Synthetic polynucleotide
  source 1..1432: mol_type = other DNA
acgttttgcgtttttagtcggggtttttttattcggcgtcggcgcgtagtatgtcgggagttgtagttttcgcgaggtaagtttcgtttcgtttttgtttgggggaggaggttggagagtcgttttgtcggtttttgaattttgtcgcgaaaagcgcgcgtggcggttttcggtttcgtttttcgtaggacgcggtgtcgcgttattttggtaatcgttttttagtcgtcgttgattgggttgggtcgcggggggcgggcgggggacgagacgcgggggttgttgtcggcgttcgcgtttgttagtcgggttagagcggagtagcgggtaggattgtttggtcggttgtttcgcggagaggttgcgcgcgtcggtcgggggaggcggatagtcgggttcggcgtttgtggggcgcggcgcgcggtattcgggtttgagattaggcgaggcgtcggcgcgcgttagacggcgcgaggttgcggtttcgggagttttcgcgcgtcgttcggggttatgggcgcgtgagagtttagcgcgcgcggtttttgttgcggtttgcgagttcgtatattcggtgtatagtttttcgggtcgttttcgtgttcgttttgcgttattgggatcggttgttttttagcgtcgaggttttcgaggttgtattcgagtttgcgtcgttcgttgtcgtcgtcgtcgtcgttgtcgtcgtcgttgttcgtcggttttttttttttttatattcggggtttagagtaggaggaggaggggtcggtgtattttcgtcgttgttttttgtaatttgtaggggtcggtgtatgttcggcgaggagtcggggtcgttgcgggtgcgtgtaattttcgaaggagataatttttttatttcggggcgaattcgggggttgtaagtcgcgggcgggcgggcgagcgagaggaagtaataaagataggttgtagttggggttggcgaaaggggtcgcggtcgtcgggtttttagcgcgggcggagagggcgttttgggagcggcgcgggtcgagttgtagttttgagcggggtttcgaggggaggcgtagcgtcgttcgtcggacgtggcgattacgggtttcggcgaagatgcgtcgtttgagcgttcgcgcggttttcgttcggggcgggcgtgatttttgttgaacggagattttttttttttttcgatttcggacggcgtaggtcggcgttaggatagtttttatcgatagcgtttttttttattcggagagaggtatcgatttttaaggagggtttcgttaggtagtttttgttatttttgtatggttgcgattcgtcgagcggagcgtcgtggtagttgagatttggtgtttttcgacggtttggttgattcggtgagttgtgcggggcggggttttgcgttggagttgggggtattttttggcgttcg

SEQ ID NO: 11242 - DNA, 325 bp, synthetic construct
  misc_feature 1..325: note = Description of Artificial Sequence: Synthetic polynucleotide
  source 1..325: mol_type = other DNA
acgttagcgaaggtcgtttcggcgtattttagataatgagcgtagtgtgtaggagcgaggggttggtagaggttaggaagtttttggggttaggcgcggttttttatttttacgttagataaagagcgcggggtttggggagttggcggttttttcgttatttggggcgtttggggggttttggggcgggggaggcgggggttttgtttaatttcgttattgttattatcggttaggtcgcggtttggtaattcgtgaataggaggtagggttgtagggcgtgagggatgatgataaggaagtcggaggagtagcggcggtagcg

SEQ ID NO: 11243 - DNA, 1242 bp, synthetic construct
  misc_feature 1..1242: note = Description of Artificial Sequence: Synthetic polynucleotide
  source 1..1242: mol_type = other DNA
tcggttttggtttcgtttcgtacgcgttggtgttatagttgtggtgtagacgttttttcgttgcgagggtgcggtcgtttcggggcgagtgtttttcggtttgtaggaggcgaattcgggttttttcgggaggcgttcgtgggaacgcgtatttgcgagtttttgtcggttgaggagtcgaggtttgcgatttttgtcgatttgagtttaggcgtagtagcgtagatttggtcgtcgtattttttttggttgggatgcgggtttacgcgggaaaggttgaaaggtggggaatatttcggcggaaaggaattttttttttttgttttgaaggaaagttttttaatatagttatgtttttggtggttttcggttttttatttttaagtttttagttagttttatatttattcgttttagtagtcgcggagtgggggtttttaaagaatttagttgtagagtaagttcggttgacgtagtgtgcgttgggggcggggttttggacgggggcggagttacggcgagagtcgcggtgagggcggggttcgggtgggcggtgttttgagcggggtttttagtgggcggggttttggggtggcggtcgttgtcgggttacgggagagcgcggagttttgcgttgggaggtgtacggtgtgtacgttggattggatttttatgtaatttcgcgttttgcgttttaattaggattgtttcgcgcgtttttgagtttcgggtttcggttcggatttgtagttttttaggtggttgggaaggtaggtgcgtcgttgttttcggcgcgcggcgtttcgcgaggtttttagttttcgttttggtggattttcgttgggtgggagtcgggagtggaggcggtcgttttagggagggaggagcgtaggcgggggttgtttacgggcggagtattgcgcggcgaagggaattttcgaaggggttgatcgggtttcggggtcgtgataggcggcgaggcggtgggaggggagcgtgtgaatttacgtcgggttttcgcgggcgacgcgagcgacgcgatttggatttttattcgggatattgtaaatagatttgtttgtgaggtttacgattgggagtttgttattttgtttaagttcgattcggtttcggcgttcgttcgcgttttgcggaggttttttgagttagcgcgcggttgtaggggtttcggggtcgtatttcggattagcgttagcggcgggagagcgttgtttgtgagcg

SEQ ID NO: 11244 - DNA, 1460 bp, synthetic construct
  misc_feature 1..1460: note = Description of Artificial Sequence: Synthetic polynucleotide
  source 1..1460: mol_type = other DNA
tcggggtagtcgagttatttttttaaagtcgattttcgggagagatttttagttggacgtttttcgttttttaggagcgatggttgtaattatttcgttcgtttttacggggcgtttttttaatttttcggttggttttttttttcgtagggtttttttcggtttatcgttttttttttgcggttttttcggttttttaggtcggatcgaggttagcgtttgatttttttggtttttagtttgtttttttagtgtttaagagcgagaatatcgttttcgtttatatgtaaaggtcgggcgtagtaaatgaagtgggaaaagagaaaaatagataaatcgttgtggtataaaagatttttttttcgttcgttttgttttgtagttcgggtttagtaggagagggttggggagaattggataaacgttttggaatttataaaggtcggtggtgtcgggggtcgtaaagggagtgaagaattgaagtagtgagttggataaattcggggtaaagtattaaataatatggatattttggtaacgcgtgcgcgtgtgggtgggcggataaaaggatttattattcgtatgattgttttaattttttattttttttgtgtacgtgtgtggacgttgttttaggttcgagttcgtttttcgtttaggacgtatagtttcgggtcgtggttttcgcgcgttcggttgtgcgtttcgggtttttggttcgcgcggtagttatagtttggcggggtttgcgcggaggaggtcggttaggcgtaggttgtcgattttttttatttcgtttagagtagtgcgtagtttttgcgcggacgggtagagtagtcggcgcgttagttcgcgcggtatcgtcgttcggtcgttgaagcgcgcggcgagtacgaaggggaaatcgaagcgcgcgcggtattgcgcgttgagttcggttagtcgtagtcgttcgttcgcgtttaggttttttaggtttgcgtcgttttgttttcgttgcgattcggtcgtgagcgtgtttcgttgtagttcgttgttcgttaggttcgggtggtagcgtaggatgtttttttggtttgcggagaagtatagatatcggcgggagcgcgttaatcgcgttcgtttcgtatcgcgtattcgagggggcgcgtaggtcgcgttcggtttttttgtttcgtttcgtttcgttcggttttaaagaaggttgcgggagggtgaagtagagtatttaggcggtgatgttttggcggaataggggcgtttttggcgcgtttttttaataagttttggattttgcgtttttcggtttttattatattcggtcgggattaggatttaggggcggggcgggaagtgatacgtttgttttttgagattttgggttaagaagagcggaggagagagagggcggtcgttgaggttcggaatttacgattaggtcgggagggagtagagacgcg

SEQ ID NO: 11245 - DNA, 1064 bp, synthetic construct
  misc_feature 1..1064: note = Description of Artificial Sequence: Synthetic polynucleotide
  source 1..1064: mol_type = other DNA
tcgcgcgattgaggcgttagcggcggagttggacggtttgggaaggtttcggtttttcggttgcggttttagttcggacggcgtcgcgtaattttgttatttttttggtttagtttcggttataggaggatttcgcgggtaacgcgcggagtttttggtatttttcggcggtgttttttgttgtttgttcggggatcgatttcgtatgtttttaggttgatttgtttaagttcgaatatcgggattatgtatttagtcgggattttcgggttattttcgcgtcggataggtaattttattagtttttaattaggatcgttatcgtcgtttcggttgttgttgttgttgttgttttttttgttattggtaagtcgcgtttcggtatagttcgttgttttcggtagggcgttgttgttttttggtttcgcgggggttgtaggggtttttgttgaggaggttatagtgttggcgaatcgcggatttcgggtgtttttcggtcgtgaagtttggttggattttttgtatgatttggtgttgtaggtgtagttcggggatcgttgcgcggtttcggtattagataacgacgtattggtttagcgatcgggtcgtttgagttttaagcgtttttcgtgcgattttggttttggcgaggtgcgttatttttatttgggcgcgcgtagttcgtttcgggatcgcgttcggttgtagttgcgttatgacgcgttcggaggggtagtagtgttattattggtattggaggtggaggtggtttttatttagttggaggttgtgattcggaatttgtttttggtcgtggaagagttgttggggattagtaatgttttggacgcgcggagtttggagttcgttttttagttcgagatagaggagtgtcgcgtgggtattttgttcggtttgggcgcgttgtttcgttatggagaatttttttattattcgtaggtttttggaggagttagagagggaggcgtttcggagatttttttgatggattgtaaagttttttaggaattaggcgtgcgttatcgttatatagtcgttagtcg

SEQ ID NO: 11246 - DNA, 622 bp, synthetic construct
  misc_feature 1..622: note = Description of Artificial Sequence: Synthetic polynucleotide
  source 1..622: mol_type = other DNA
tcgttagttagacggtgtttttgtcgtttttgtcgttattcgttgggtttcgtttcgttttaagcgtattttcggttcgtagggtgggaatacgaggattatagtgttttacgggcgggcgggttaggatcgtaatttcggcggagtcggcgtttttgggtatttttggttttcgcgtttcggtcgtacggtgattattcgggaggggatttcgggcgtttcgtaatttttcggttttcgtgggttttcgggtcgtttcgtttttcgtcgtcgcgtatttttcgcgtttttcggttttcggtgtcggttttcgtttcgcgtagtttcgagtttttagttcggtcggttttttattcgtcgagcgtatttatggcggcggtttttagggtttttgcgatttgtcggcgggacgtgtttttggtaggtgttattttttcgatttgacgtttaggttcggtttcgttgttttaggtatagttttagttttgcgaggcggggtcgtcggttttattcggggggcggtgttgcggggagtagaggttcgtgttttcgagtcgtcgcgcgtggatattagtttcggtttaggtgcgggtgggtttcgacgggagcgcgtggtaggtcg

SEQ ID NO: 11247 - DNA, 1622 bp, synthetic construct
  misc_feature 1..1622: note = Description of Artificial Sequence: Synthetic polynucleotide
  source 1..1622: mol_type = other DNA
gcgtttttaaaatcgagtttatcgttttttttttttgcgtagtttttatttttttttgtgtttcgtattttaataaacgttttcgttaagtgattttagtttgaaatatgcggtttttcggatttttttttgtgttatcgattttttgcgtttagtttttcggagttgtcggtttaatttcgtaagttttttcggaattcgtgttttttttttgggtagcgttattattacgagcgtttatttgagaggacgtttgtttttatttagtttttattttgtagtcgagtaattttcgtaaaacgaatatttggtttagtttttgttggaaatcgttgaatagtttttattgttttttggaagggtttgggtagttcggcgtggcgtttacggttttattaggtttttgttttttgtaggtttcgttatttcgttattaaagcgttcgtcgcgttcgtatttgttgtgaggttgtgttcgggtcgttttcgtcgagggaacggtttttttaaggttttgcgttttaattttcgttcgtttgttaagaggtagtcgtgtcggggagttagagtttttcggggatttttttttgtttttcgtggttttttgtggaattttcgttttaggatttgtacgtcgtttttagtcgcgcgcgcggtacggagatcgttcgttgtgtttcgcgttgcgtttttttcgtttttttttcgcgtaggtttttttgtgttagtcggttgtcgatttaggttaggaagttcgaggtcggggcgttattttaagggttttttcgtttttttttcgagggtagagaggcgttcgcgttcggacgtattgcgggaatatttggagcgtcggcggagttcggttgttttcgcgggagggagttcgacgcgtatttttgggattcggattcggcgttcgcgtttcgggacggatttttgtttcggttgtaggcgtagcgcgtagatttgagtttgtttcgcggaatcggggttcgagtttcggttcgagcgcggcgtcggggttagcggagaggggcggaagtcgtaagggattttcggcgtttcggtttggtcgcgatgaagttttcgtttttttttaggtgacggatcgtcgttgtcgtttcgggttgtttattatttcggcgcgtgttcgggagtttttatttttttcgggttttgtggtcggttacgcgttttaggtacgcgtcgcgtcgggtcgcgttattaagttcgttgtttttagtttttttcggtagattttttggttatttttattttgcggaggggtcgtttattagatgttagaaaattagggtggggtacgtaggttaggggttttagcggttgggtatcgtgtttttttcgaatttggtgttggaagtgcgttcgttttcgttttttttaggtatttatcggtattgtttagttttgtttggagggtttaggattgaacgtttgttttcggtttttattttggttgtagaggattggtcgggtgatgtcgcgttgttttggttttgggttcgtttggaagattcgtttgtgtcgcgggttttttttttggttttggtttttaaagcgttttcggtatagtttttcggtttttgtagttcggtggggtcg

SEQ ID NO: 11248 - DNA, 324 bp, synthetic construct
  misc_feature 1..324: note = Description of Artificial Sequence: Synthetic polynucleotide
  source 1..324: mol_type = other DNA
acgtgggttcggagtagggggcggcgttcgcgtttgattcggtttgtcggttgtttgtcgttcgcgtaggagttggtcgggcgtcgtttgtaggttgtttcgggtcgagtcggagcgacgttgtcgcgtatttgggtagttttcgggggtcgcgttgtgttacggtcggggtcgttgcgattgcggcgtttgtatttgttacgtgattgagtcgggtatgtttttcgggtttttgtgtgagtgttatgagtgggtgtgcgagatttacgacgggagtatttgtgtaggtaagagggcggcgttgttttttttttcgggaggtcg

SEQ ID NO: 11249 - DNA, 1881 bp, synthetic construct
  misc_feature 1..1881: note = Description of Artificial Sequence: Synthetic polynucleotide
  source 1..1881: mol_type = other DNA
tcggggttttttagtttcgtcggggcgtttgtttttcggttgagttcgttcgtagcgcggttttcggttattggcgaggttgtgcggaattagaaggtcgatcgcgttcgggtatttttcgcgcgtttttgattttagttcggtttttcggaagtcgtttgggcgatttcgcggtttaatattcggttttgcgaaatcgttcgcgttttcggttcggtttggagggtttcgtattattcgcgcgcgcgcgcgttcgtataggattcggttaataggcgtcgggatttttggagttcgttttgttagaaatttgttacgcgcgtcgtcgtatatgcgttttaggttttttcggacgtaggcgttatcgatttcgttttcgtttcgcgtttttcggttgtttcgtcgcgatttcgggtcgcgagcgttgtcgtataggcgttttaggtttttcggggtataggcgtcgtcgatttcgttttcgtttcgcgatttcggtacgttttacgtttttcgtattttagattcgtttttttcgatttttattggatagtcggggaaaatggcgttttaaagcgttcgtatttattttgtcgaaatgcgcggtttagtgtacgggcgtttagttatagaaggagtttttagaggttaggtgggcgtggggtgtttgttgtagtagcgagtagagcgtggttaggttttcgtcgcggtaggcgcggtgtagcgggaaacggagcgagagtagtttttcgttggagaagttcgtttttacgttcgcgttcgttttcgtcgtcgatatggttcgttatcggagagcgcggggttcgttggtttagaggacgcgtcggggaggattcgagaagtcgtcgtcgtagtataaaggaacgagattagcgtcgcggtcgcgttttataggttgtcgagcggagcgcgtatagagggggcggggcggggtttggagcggtcgggttgggggcggggtttggtttagaggacgttttgtgtagtcgggtaggggtcggggtttggagtcgcggatttttggagtcgtcgggtagggggcggggtttgagtcggaggtcgtttggagtagtcgggcggagggcggggtttggagttgcggacgtttggagcggtcggtaggtggcggggtttagtttagaggatgtttggagtagtcgggtagggagcggagtttggattagaggacgttagtagtagtcgattaggaggcggggtatggggttgtcgacgtttggagtagtcgggtattgggtttgggttagaggacgtttggggcggtgggcgtttggagtagttaggtagagggcggggtttggtttgggtttacgtttggggcggtcgggggcggggtttggttggaattgacgcgtggagtttcggtggagggggcggggtttggttgggtcgttgtttatagcggttttcggggtttggaggttacggggttcggaggttacggggttcggaggttacggggttggttgtgtggggggtttaggggcgtagagtggttaagtagcggtttgagcgggtttcggggttttcggcgcggtgggtttcggttgcgtttcgggtgcggattatgatgtttttagtttgggagtcggttcgggcggggaatttcggttgtcgggggcgcgggttgaggttttgcgggttcgcgtttagagcgggtgggagttacgggtttttcggaggtttagtagcgcgcggtgaagttgtttagtaaaaatttatggagcgtttacggggagtagggattttcgttaaaatttgggaattagtaagttttagttttttatagagtaggatagatttttcggttttgttcgagggacgtttttttcggaatcgagtgcg

SEQ ID NO: 11250 - DNA, 944 bp, synthetic construct
  misc_feature 1..944: note = Description of Artificial Sequence: Synthetic polynucleotide
  source 1..944: mol_type = other DNA
tcgcgtggggtttagggaggcgcgggttgcgggggattgcgtaaggtcggggtttttggaggtcgaggtcgcggtgtttttcgcgaggttattatgagttgagtgtttttggtaggcgtttagggatttttcgttttttttttttcgcggtttcggcgggcgtcggttagatcgtttcgttttttcgttagttcggaacgttttgtattttttttttcggttgttcggcgttcgttagcggttagaaattttcgtttcgttttatgtaatcggggatttcgcgttttcgttgtcgtttcgttttcggtttagaggacgggtttggggggagggggcgtgtggcgacgttgttatttattagggtttagtcgtcgttttttcgagttgggtcggtgtttcgcgcggttttgtagttttgtagcgttcggggcggtgtaggagtttcggggtgtcgcggcgttcgttcggttgtatcgttggtttttcggttcgggttttaggttcggcgttttttatttttaggtcgcgcgcgtttcgttttttcgacgatttttagtttcgggttttcgttatttacgagttttcgttttcggtgagttgttgtttttagggtttcgagtcgcgcggtattttttgcggttcgaggcggattttttgtagttttttgattatttgttcgtatttttcgttttttatggagtttaggtcgttgtcgtggcggtcgtttagtagtcgttttttttttagttcgtcgcgggggttttttatggtttatttttgggggcgttcggtcgtttggaatatggcgcggacgagttgcgggcgttgttgcgggtgcgttgggtcgcgggttgcgcgttgttttttcgttggggcgttggcgggcgggacggcggtacggattgttgtgggttttgtagcgtcgtcgcggcgttttataaacg

SEQ ID NO: 11251 - DNA, 1514 bp, synthetic construct
  misc_feature 1..1514: note = Description of Artificial Sequence: Synthetic polynucleotide
  source 1..1514: mol_type = other DNA
tcggcggcgttttttttatttagcgtgaaatttacgaggcgcggcgtttcgagtggcgggcgggtagggggttgtaggatttacgaagttattttcgtcggggatcgttttttttcggagtggtttttttttcggcgtttcgttttagtaagacgatatttaggttaaatagtcgttttcggttagttcgattcggttttggagggagcgtttcgagggagtttagtcggaggcggagaaggttattcggttagaaggtggggagtcgtcggcgttttttcgtattttcgtttttatagtagggggaaaggttttgatcgtcgtggtttatattatcgcgtttatttgaggttcgtttcgttttttgggtttttagaggggtggcgtatttcgtttttttttgtttttaagtggtcgtattttttcgcgggacgtttggttgggtttagggcggggcgggcgggcgtttttcgtattgtcgcgagtttagcgcgtagttttcgcggttcggttgtcgtcgcggttagttggggcgggtcgggggcggggttttagggggcggggattcgggggggcgggtcgggtcgggaggcgtgggtggggggcggggcggacgcggagcgtttttttggttggcggggttaaggggttgagaggagtggggtaggttcggcgtcggtaggaagagttagaggggtgattagagagtttaacgtttggtgtttaagatttttttcgaggtatgaataagaattaggcgtttgggtttttttcgttcgttttatcgtttagtcgtcgcgtttcggacgttcgttgtgttttttgtcggcggggcggcggcgggattgggtttcgggagggtttttggaagtcgcgagttttagcgaaggtagtgtatcgtttttcgttttttttttcgtttttttttcgtttttttagttttgggtgtcgggtatcggtggtaaggtcgttttttcgtgagtcggaggtcgtttattttgggacgggcggacgaggttttagggtagtcgagttcggtagcgggggaggcgtggagttcggggcggttttagcggcgggggcgggaggttggttttggttgtagattgcgcgtttgggtttcgtgcgcggtttttggttttttgtatcgcggaggttttcggattatagggttttttggcgggtttcggtatttaggtttgtgtcgttgtggttgggcgtcgggattagtattcgagtttcgcgttttcgggggttgcgtcgtgtcgtttgttgtgcgcgcgtagaggtcggatagttcggttgcgggaagggattcgagcgtagggtttgtttcgcgtttcggaaagtgtttagtttgcggagtcggaggttgagttggggtagatcggcgttagacgggggtttgggtgagatacgagttgggggtgcggtttgtagaatttgggtttttggaggagtttacggcgcgttggcggagttttaggcgaataggagtatcggattcggtttcg

SEQ ID NO: 11252 - DNA, 2144 bp, synthetic construct
  misc_feature 1..2144: note = Description of Artificial Sequence: Synthetic polynucleotide
  source 1..2144: mol_type = other DNA
gcgtcgtttttttttcgcgtttttcgaatgttaagtgtattagtttttaattttttttttgggcgggttcggtttggttaattttagttgtagattttagtataaatttaggattttttttcgtttagtcgtttttatataaggattcgtcgaatatattttgaatttcgcgttagagcgtagttcggaattgtagttcgcggcgcgggtttaggtcgggggtcgcgcgtttttagtcggtgatttaaggtcgttcggttcgggggtgggtgtgggtcggtaggatcgattagggtcgcgcgggggtagttgtcgggcgttcggttatttagcggtgggagtcgaggttggttttggttagtcgttatttcgtcgcgggcgtttgtttcgtcgggttttcgggcgcgggaggaaggttcgcgtcgttttttattcggcgcgttttttttttagtgcgtagtggtttggtgggttagtcggcggcggttggagcgcggggtcggttttgcgtacgaatgaatgggcgttcgggggacgcgcgcgttcggggttgaagggtattaggatcgtgaggatcgtttcgcgattttgtttttttttattattttttcgtttttttattttttttttttttttgttttgtaggattgagtagttaggcgcgagcgaaaataaatagttggggttgcgagcgttttcgtttcggtttcgagagtacgtcggtttagttttttatttggggcgttcgtttgtttattatgaggaagattcgcgttaatgttatcgttattttgatcgtagtttggattttgggtattttttattatttatggtaggataatcgagtttacgtagtatttttcggcggtcggggcgcgtagagggtaggtaggaggtcggagtagtttcgcgaggatcgtattatttcgtttattgtgagtacgtttcgagcgtcggtcggtcggttagggagtcgcggcgcgcgtttagattttgcgcggcggtcgagggcgcggggttcggttagggttgagtgttcgttgcgtcgggtcggttttgtatatgttggagtatttttgttcgttgttatggtaatttttgtcgggcggcggggttggggcgtatcgattaagggagggtgatagagggtgggggttgggagaaagtgttgtaagtttggtgggttcggcgtgcgcgcgcggttgggaacgtggcggttttttcggttttgcgttgtcggggtcgggagtttgggggttgcgggagtttcgtgtgtttcggaaggttgtcgggtttagcgcgcggcgagcgggcggtgggaattattcgtagtcgagcgcgtaggtggtagtgcgtagtttttttttagttttttgggggtagaggatatcgggtgggggcgtgggtaggggaaggttttttaggcgttgcgtttggtttcgaatttttttttgagtcgggttaatttgaattcgttttttcggcgcggatatttagttttttcggagttttttgggttgaggagaggtttcgtattgtacgcgttttttatttttaattttagggttcgttattacgggtaggtgggtagtgttagcgttcgaatttggcgatatttttgtatgaagttagtttcgcgatatttaagcgggtagggaaataaaggtagtgtggtatagcgggggcggcggcggggttgcgggggtttttggcgttttggggattcgggcgggggcgtgcggagtcgtagtcgttttgtagggggcgattttgtcgtcgttttcgttcgagttttaggtgatagagttgtgcgtggttaggtaggggtatttgttgaggcgggaggttttggtattcgtcgagagtgcgttcgagcgggcgtatttttttagacgggggcggttggtggacgagagtttcggacgattttcgggaattattagggcggggtagtttggtcggatgaggattaggaagaggagagtcgagtggggcgggggtaaaggagtgaggaagcgtggcgatttcgataaggaaagatttgggtttgggggtggaggggtgaggagattcgcgggggaggtgtaaggttcggagggttgaggtttgtgtggagtcgaattcgagaaacgtatttagacgcg

SEQ ID NO: 11253 - DNA, 379 bp, synthetic construct
  misc_feature 1..379: note = Description of Artificial Sequence: Synthetic polynucleotide
  source 1..379: mol_type = other DNA
tcgttcggcggggcgtttttacgttgtgttttttgcggtgtatcgaggcgtattcggttgttttgttgcgggttttttggttatttgtgggttatagggagagacgcgtttatatattttcgttcgcgtttaggatagttgcgggagtttcgggtcgttttaatttaatgcgtttttcgtaggttgagatgcggttgtttttgttcgtgtcgttgttgttggttttagcgttcgggttttcggtgagtgcggttttgtttcggttttcggaggaatttgtaggggagtcgggggcggggacgcgcgggttcgtaggtaacgtttttaggaaaggggcgatgttagggaagttgggttgggaggaggcgagttcgtatcg

SEQ ID NO: 11254 - DNA, 637 bp, synthetic construct
  misc_feature 1..637: note = Description of Artificial Sequence: Synthetic polynucleotide
  source 1..637: mol_type = other DNA
tcgcggtacgggagtgcgtacgcgcgtcggaggcgaaggaggaatttatcgtatttatagggcggtcgagtgagggagttgttggcgggtgggtttggtaattttttgggaggtcgacgcgggcggatcggcgggtgttgggaatcgagtttcggtttgcggtcggtagttttcgtgggtttgtgaagaggtcggcggtttttgcgggcgttagttaggtaagtttagttcggtgttttttaggaagttcgtttgcgggcgcgggtagggagtcgtatcggttatggtggttgaggagggagaggttgttgttcgtcggtcgttcgattttaggttttttttcgacgggttcgtttcggggagtaggggtgcgcgggggttgtttttgcgcgaacggttcgggcgggggacgtggggcgcgttgggcgtcgttcgtcggtttaggcgcgcgaatttggcgtttttagtgaattattcgcggttcgggcgttcgggttcgggatcggtttttttttttttcgttgagtcgcggtcgagttggttttttgtattttatttagcgtcgtcgggacgcgattatatcgagatggtatcgagttttttttaaaggtttcggtttgttgaaagtggggcggcg

SEQ ID NO: 11255 - DNA, 959 bp, synthetic construct
  misc_feature 1..959: note = Description of Artificial Sequence: Synthetic polynucleotide
  source 1..959: mol_type = other DNA
tcgcgggatcggggggatggtcgatttttagatacgggagggattgagcgatgtttaaggagagtaggagaatattgcgtttggagatttttgagagttaggggcgggtcgttttttaaagggatttcggagtttcgatttttagttttagttttttttgtgatattatttttcggatagagatttaagttttaggttcggtttcgtttagaggttttagggagaagattaggttatcgtttattgttcggcgtcggggaggaaagaggaggagtttttgtgtgtttatatttttggtcgtttagggtagttcggttcggtttcgtaattttagtttattggttcgggagattttaaaggttttatcgttagcgtttttagcgtttattgtgtgcgttttattttagttttgtttgcgcgtcgttttcgttattttcgttttagtttttgggtcggaagtttttttttttttttcgtcgtagtttttttttagttttttttttttcgtcgatgcgggaaatttttttcgtttcgtttcgttttttttttttagttgtattttcgttcggttttttcgtttagtttttaatttaggtttcgtttttttttatttatttttcgttttgggtcgggttttcggttttatcgtttttttttcggtttcgtttcggttttcggaagttttatttcgttttcggtttcgttttttcgaagttttttgggttttcggtagtcggcgggatagaacgcggagagtcgtcgtttggtcgggcgtagacgcggtggtagagttcgcgcggcgttggaagcgagtggcggagcggcgggatttcggcggattcgttatggaggaggaggtgagggcggggttcggcggggcgttgggttggggttttcgagttttttacggggattgcggttttgggtttaggttttcgtttttgttcgttttattttcg

SEQ ID NO: 11256 - DNA, 826 bp, synthetic construct
  misc_feature 1..826: note = Description of Artificial Sequence: Synthetic polynucleotide
  source 1..826: mol_type = other DNA
tcggtcgttagttttgggagtttcggttgggcgacgaagttgcgggttggggtatcggttgtttttacgggtcggttttgatttaggggttcggttcggagttgttttttcggcggcggggttgatttaattttttttgttcgaggagttgtcgcgcgtagttagcgtttcgaattcgcgcgcggttcggcgttttttcggggtttatttttcgggttagtcgtcgcgtttatttgtgttcgcggttcggttttttttcgttcgcgttgttttagtcggggttgaggtatcgggtcgggttttcggcgtttcgagttttcgttttttttttttcgttttttaattcgtttacgttttcggttttttggatggcgacgcggatttgtatcgtcgttttgggttcgggtcgagttttttcgtcggattgggttatggttcgcgggattgcggcgtcgtcggggtttttacgtcgtaaggtttagttagtcggtcggtagcgattgcgacgagggggcgggggcggtgcgagcgcgtttgtcgttcggtttaggggagggataggggtcgcggcgtttcgtttcgcgtcgtcgtcgtcgtcgtcgtcgtcgttattatttcgatcgttagtggagcgttcgcgtaggcggggtttcggaggtggagggcggtttttcggagttttttcgacggaggttcgtttcggaaggattttcgcgattttcgattatttttttcgttttttcgtcgttgtggggttttagttcgagaggaggtgttagggttttttttttttgcgtttttttttacggcgtcgtagggatgggcg

SEQ ID NO: 11257 - DNA, 2156 bp, synthetic construct
  misc_feature 1..2156: note = Description of Artificial Sequence: Synthetic polynucleotide
  source 1..2156: mol_type = other DNA
tcggtcgatttgatttttttttgttcgcgttttacggttttttggttgtcgaatatttttagggagaatttgttgatttcgggttggagtatggtttcgaattggcgttgtatgaagtcggtttggtttaggcgtatttcggttttcgggaggatttggtcgtcggtagtcgcgtttttttttattttgatagcggtgtttatcgagggttgttcgtaggaggcggaggtcggttgcggtggttgttggggcggcggcggcgaggttgcgggttgcgtcgaggcgtcggggcgttcgggttcggtcgttaggtttgggggcgttttgttttcgtcgggggacgcgtcgttttcggcgatgagtcgtcgttttttcgcggagttatgtaggtgttcgtgattgttgtcgtttttcgtgtcgtcgttgtcgtcgtttcggttgtttagcgaggttaggttttcgcggaagcgtttgtagtcgtcgttcgtgttggatttgttcgcgtcgcgggtcggtttttcgttgttcgttgtttcgagggtcgagtttcgggatttcgtgttattcgcggtcgtcgagggggagggcgagggtagtggtcgtagtcggatgtttttgcggttggggttttggcggttttcggttttttttttttcggcgttttttttttcgtttatgatttacgttttggtttttatttgttgcgggaggttgtagagtcgtttgcgtatggacggcggtagtttgtttatggcgttaggggtcggggtcggatcgggtcgggggtaggagcgcggcgtcgcggacgggttttaggttcgttcgtcggttagttcgttcgtggggacgcgttttttgtcgtcggcgtgggggtagttttaggcgtttatgtttgggtaggttgcgcgtcgcggggaggattttagtttcgtttcgagttttcgggttcgtcgcgttatattttttttcgggttcggttgggcgcggggatttcgcgttttttttttgtttttttttttttttttggcgtttaggggcgcggcgcgtcgttcggttttaggcgtttcgttttcgcggggaataatgggcgtcggtcggagaggttttgcggtcgcggcgtttagggaatcgtttcggagtgtagagcgtacggttcgcgcgggtttcgggcgtgcgtttcgcgggagggttggttgttcgtttgtttcgtcgttcgggttttgtggttggttattcgcgagttcgtttcgttttttttgtttcggttcgttcggttcgtttcggggttttcgtcgtaatcgagcggagtttagcgattcgtcgggtttatattagcggtcgtttttttcgaagcgtttttcggtagcgttcgggttttcgcgtttcggaatatttatgaagtcgtcgtagttcgcgggttgttataggagcggttttagtagtcgggtttgtttatttgggttttttaaaggggtagcggcgtacgggtcgggggttggaaaggggcggggggcgggtttggtaaggggtttaggttagattttcgttagattttcggggtcggggtgagaggtatttatattgttgcgtttttaaattttttttttgggttaagttgggagtgcgttttaagtttgaagtttcggttttagttgcgaattttttattttaagattgaagggtggggggtggttttttaatttttttattattaagttttgggttcgtttttttttggtatttttgttttttagttgggttttcgattttttttttgggaggcgatcgggttcgtttggatgtagagtttcggttttttcgtaatttttttggagagggggttttcggaaatgcgtcgcgtcggggaggtttttacggtttttttgtgatatgggtagggtgcgaatttcgcgttagttttttttttgtaaagtttcgtagtagttaggtaaggagggcgtggggaaatagggagatacgtatagggcgcgcgggtgggatttagtttttcgaggtaagatttcgaggaaatgcgtcggtaatagtgacggatgcgagattcgaacgtcgattttcgtacgcgtttttttttcggtagtttcgagaaagggataagtcggttgtagcggggagcggttgggtcggtttttcggacg

SEQ ID NO: 11258 - DNA, 1441 bp, synthetic construct
  misc_feature 1..1441: note = Description of Artificial Sequence: Synthetic polynucleotide
  source 1..1441: mol_type = other DNA
tcggagggaggaattatcgtaagcggagatttcgggcggcggtcggcggaagggttgggcgggaggcgtcgggatgtcggtaggattttgcgttcgagggggtagggggttcgtgtcggggttttaggcgtagattgatggggtttaagtagggaatgtgagggcggggagggcgtataacggaagggattaatttcgcggtttcgagttgggagtaaatttcgttttttattttttttattcgttttttttttttagtgaagacggtttgggggcgggtggggaggcgcgttttcggagcgttttcgcgtttttttttcgtttttcgcgcgcgatttatcgttttttttttttcgaggttagcgatggttcgggtgcgggcgaggagttgggagggcggttttcgacgtaggtgttagattcgttcggtagtgttcggcgcgttggttcggtttttagttttttcggtcgtcgtttttcgttcgtcgcgtcgcggcgttaggagggcggggtcggggcgcgcgtcgttttttagtaagcgggcgggcggcgttcggtttgagggagcggggcggttttcgtcggcgtcgcgcgcgttgtgtgtgagcggggtcgcgcgcgcgcgcggtaggcgagtgagggaacgaggagcggtcgggtgtgagtgtgtgggagtgagagtgtgtgggagtggggtgagggagaagttgacgggacgcgaggttgtgagaaattgggcgagtgtgcgaggacgttcggttagtttgcgggagtcgtagtcggcggaggagaaaggaggcggttttcggtatttcgattttttttttttttttttttttttttatttttagtcgttcggcggttcgcgttttttcgaaggttttagttcggtttagtcggtcgagagcgagggaggagtttttcgatttaggtgagcggtacgatcgttgttgttttcgggtgtagagtagtgaggcgaaggcgcgttttttcgagtgggcgagtttagcggaatggatttttcgattagcgggggttgggtcggggaggggatcggttcgagcgcgttcggggttcggggttagttgaggtcggtggtcgtcgtttcgcggagtcggtggggagcgaggcggggttcggttttcgcgcgtgtgtcgggaggcgtcggttcgtggcgtgtgcgtgcgatcgggcgagtcgtgtcgagggggcggcgatttcgggcgtgtaaggagtatggttttttcgtcggcgagggggtgtggtaatttcgggaacgtcggttggagtcggattcgcgggttgttgatttgttttcgggattgcggcgatatttttttttttttttttttttataaattttatggagcgatcgcgggaggaggattacgtggtgcggtttcgtagttattgtattcgattttacgtttttttttttacg

SEQ ID NO: 11259 - DNA, 734 bp, synthetic construct
  misc_feature 1..734: note = Description of Artificial Sequence: Synthetic polynucleotide
  source 1..734: mol_type = other DNA
tcgattttgggtatatagcggtaaattttgtttcgtaatatcgtgtgggttttcgcgtattttttcgcgtgagcgtttcgagttcggtgtagtttcggttttcgcgcgtttttgtttttcgtatagcgttttcgtttcgaaggtgttttgataatttcgtaggcgttattcggagtcggggtagggtagttggggttggaggcggcgggcgcgggacggagttttatgaaagttggaagaagtgattataaatcgggattcgattttcgtagttttggcgttcgtttttttacgtaggttcgggatgtcggttttagtttttagatgtcgggaagacggcgtcggttagtttaaggaagagtttttaggaggttggggagtaagggtgtcgggttttttatgtcgggttaggttttttaggagtgtcggtttttagggttattaggtttaggtttgcgcgaggagggagcgcgcgtttttttttatttattcggttttcgtttttaattcgtttttcggtttatatttatttgtttggttgtaagcgtcgtttcgggttaggtagttaggtttttatttttagtgcggcgcgtttcgatgtcgttatcgggattttcgttttttaaattagttttttttttattcgtaatttcgttcgtcggggcgttcgggggcggaggcgcgagtcggtcggcgtcgcggagtcggttcgtagatagggcgggcggggttcg

SEQ ID NO: 11260 - DNA, 935 bp, synthetic construct
  misc_feature 1..935: note = Description of Artificial Sequence: Synthetic polynucleotide
  source 1..935: mol_type = other DNA
gcgtgcgattcgcgtttattgtggtttcgttttattgatgatcgtgaatttgtagggtgttgggttagttttttattttaaggttgggtaggttttcggagtttttttcggtttagatagaagtttttttaggagcgggggaggggaagggggcgcgcggttcggttttaggtgtggtcgcggataatgagattttggggatgggggcgtatttgcgttacggcgtttcgtagagggttttttaggagattttttcgggttttcgtcgcgtcgtgggggtggggtagttttgttggttagagtcgggtacgggtcgggcgggcggcggggatcgtgatcgcggttgcgtgcgttcgcgttcgggcgtttttgtgcggggttttggtacgtcggcgggggcgattcgggtgtcggttcgtgcgggcgatacgcgcgtttttgcggggttgcgcggggttcggagcggttgggggttttttgtcgggcgcggttgggcgcggggggcgttttcggtcgggatgagtttatcgtagtcgcgtcggggttgagcgtcgagcggggcggcggcggggcgggcggcggtttttcggcggtttcgcggcgttcgggtcgcgcgtcgttatgttgggtttggacgcgtgcgagttgggggcgtagttgttggagttgtttcggttggcgttgtgcgttcgaggtgagcgggtcgggtaggggcggggggttcggttggttttagtttcgggcggggagtagtttttttttcgcggtaattttgggggcgcgtatggggatttcgcggcgtcgatttttcggttggggtttggtaggggtgggggattttatttaggttttagttttgtggggaagggattaggtgcggacgggtcggtttgggaagcggcggcgttgggattttttttttttggatatcgtcg

SEQ ID NO: 11261 - DNA, 1054 bp, synthetic construct
  misc_feature 1..1054: note = Description of Artificial Sequence: Synthetic polynucleotide
  source 1..1054: mol_type = other DNA
gcgcggttttcggaggtcgatattataacgtttgtaagggtcggttggggtcggtatatgattcgattttacggtcgtttttaggggtggaggggtcgttattttaggtttggggaaggaatacgaggttttgaggagcgaatttgttttaggtgttcggggaggtttggcgcggggttgtttcggtttttttttagagtcggggagaggggatatcgtaggatgtcggcgttcgaggcggtagtattaggtttacgggcgttttagtttaaatatttttcgtgtttttagagcggggattttcgttttttagattcggaagcgtcgtttttttcgttagggacgtttgggttttcgtagatttcgtcggtcggcgcgttattcgcgttagtattatggatagcggtcgttttagtcgcgcgtttagggttaggttcgggttggtttttatcgcggacggttgcggggtcggggtagtttcgtaattttaaatttcggtagttttcgtttagtagggaggggtttcgggggcgaagagtgggggagaagtcgggaaggattcggaggaggcggcgggggcggcgttaggggaggaataatttcggcgtagtgtcgatttaggttgaaaacgtttttagttatgggtttgtacgtggagcgtcggggttgggggaggtattcgcggggtttttttttcgtttcgttcgggagtttacgtttgtcggcgtttatagtttcgtttttatttttaggttttagggtcgagatggagaaattaagtcgtattttgagagtttataggagggaggggataggttgaggagcggtcgtttgggtatgggttcggggtttggttttttttatttatattcgtagcgttgttagaaggcgttgttttgtttgtggttagttttcgattcgtgtgtttggtgggagttgtattttcgtataggtagttttattgttttttaatttcgcgtttacgtttttgtcggttttcgttgttttttatattttcggtttgattgatttagttcgaatattttttatttcg

SEQ ID NO: 11262 - DNA, 1474 bp, synthetic construct
  misc_feature 1..1474: note = Description of Artificial Sequence: Synthetic polynucleotide
  source 1..1474: mol_type = other DNA
tcggacgttgtggtagaggaggttcgcgcgtcgtatatttgttgggatttttagttcgtttaggattggtagggagattttggaagattagcgttcggaggggtgaggtttcgttttgggggtaaggtcgcgaaattacggtttgtagttttacgttaggggtataaagaaaagcgtcgtcgggaatttaatatttgtagacgacgcgtagtcgtagaggaggcggggcgttcgaggtttcgtttcgtatgttaatgaagtatatattatatcgtttcgtttcggcgcgagatcggtttaacgttgcggagatttagaggtcggcggcgttcggaaatattcgcggaggtcgaggtagggcggggtcgggcgtcggggtcgggtcgttgggcgggcggtatagttcgggggaggttaacgggtcggtcgggcgtttcggggacgcgttttttttacggtgcgaagtggtacggttcgtaggggcggggtttaggttatgtgacgcggtcgcggtcgttattttgttttgcggtgttggtatttagagcgtagcggttgacgggtcggatcgttttcgtcgtcgttcgttcgtaaattttcgtgttcggttcgttttcgttttcgttttcgttatcgtttcggtttgtagagtttgttttttttttattcgtagatatgttcgagtttaagagcggtttcgagtatgtttcgtttttcgtcgttatgggcgtttcggtcgttatggtttttagcggtgagcgcggcggcgggagggattcgggggcgggggcgcgcgcgttgtttatgttcgtagttcgtcggggttcggtgtgtgacgttattttgacgtaatttcgagttgtcgggggcgttcgggtttcgtgtgatagcgggcgggggtcggcgtttcgagggttgcggggagtcgtcgggggttcggggcgtagggcgtgcgggtttggtcggggtgtgagtttcgggggttcgggtcggcggttttgttagtcgggtcgtgcggttgcgggggtggggcggcggcgtcgttgttatattagtttcgggagcggcgagagggaggttggggtgggggcgcgaggggggcggcgcgaggggggtcgattttgcgggtaggtgatattatatttcgaaggttttagtgcgcgggcggcggcgcgggttcggtttaggaacgtttagtcggtcgttggagtttttcggttggtggggagtttatgttttttacgggaggtttttagttttcgtttttatggcggtcggtttcgagggttaggtgggttttatttataggtaggtattttcggttggagttggttatagttgtttaatattcgtgtcgttgtgtgggttgtttgggaaagttgggttgagggtttggttcggagagttcgcggagattcgggtgggagtgtgtggaagtggagggagcggggagatagtagtatcggcgttggcg

SEQ ID NO: 11263 - DNA, 357 bp, synthetic construct
  misc_feature 1..357: note = Description of Artificial Sequence: Synthetic polynucleotide
  source 1..357: mol_type = other DNA
tcggagaatttcgtatatatacgtattcgtaaatacgcgggttttttgcgttattaggaagtagtcgttagaatcgtcgggtgttttttaattatttttgggagatttggtttttcgttttcgttcgcgcgcgcggttacggcgtttttttttttttcgggtttttaaggtcggattatcggtttcgttgttatggcgacgtcggtttatttttttttattttcgcgcgtttttacgtttttttttcgtagggagttggggtttttttttttttttttttacgttcgtagggatttataggttgataggagtagggggtcgtttgttgttatcggtcggggatttcggggtttttcg

SEQ ID NO: 11264 - DNA, 814 bp, synthetic construct
  misc_feature 1..814: note = Description of Artificial Sequence: Synthetic polynucleotide
  source 1..814: mol_type = other DNA
tcgtcgggagtttcggggttcggttttagtttcgggttgaataagtagggaggggagaggtatttaggtttcgttttttcgcggttttttttttttagtcggggaggaggagatttaggaagtcgcgttcggtttcggtgggtggagggtttaggtcgcgttttttagtttcgcggttttaggtttcggttcgttcgaggcggagttcgggaggtcggggcggggtttcgggtcggttatttatttgggttgttagttattttagtttcgcgaatagttggtgtcgtcgttgtttagtcgagatttcggggttttgcggtttattatttttttcgatacgatatggttaagcgtcgtcgttcgaatcggtcgtcgtcgatatttcgtttcggttcggggttgaggaggaagtcgagaaggaggaggaggaggcggcggcggagggcgggggaagaggacggtcgtttcgggtttcgtttgagttcgtagggtaggacgagggagcggcgcggtgagagaggcggatgaaggcgaggcgacgttttttttagggtcgtgcgcggtttacgacgttggggtttcggaggacgaggaggacgaggagtaggcggtggcggtagttttttacgtttatacggttattgttttttcgtttttcggtttcgttcgtcgcgtcgtcgttgtcgtacggtaagttgggagcgagaggcggggtcggtttcgtcgggtttggggagagaggcgggttttgtcggcggggcggggtcgatagtaggtagtttcgttttttacggttttaggtttttggacggcg

SEQ ID NO: 11265 - DNA, 847 bp, synthetic construct
  misc_feature 1..847: note = Description of Artificial Sequence: Synthetic polynucleotide
  source 1..847: mol_type = other DNA
acgtaaagcgtttttttttttattttcggagatggtacgtgcgcgtttttacgtagtggcggttgttgcggcgagtacgttttttgcgggatttacgcggggagtgggttggtagtgcgcgtatagcggcggcgagtgggtcgtgtacgcggatgcggggtgggagtgggggcgtacgcgcgggcgtgggcgagcgggtttcggtagtgtatatatacggtaggggcgggcgatagatgtagtgcgtgcgtcggagtttaagcgtataaacggaaagagcgggcgcggtgcgtaggggcgggcgtttagcgggtttggtatgcgcgttttcgttcgaggttataaaagtatcgttatttgttgttattagttaagtcgcgcgtttagttgtttggagaagttcgtttatcgtttttagttgttgtttttttcgatatggattttgagatttgtttttgtttttttggtgagttttcgttttcgttcgtattttgcgtattgcgcgtttttgtatttgtaaagaaatttacgttttgcgttttcgtttaaggatatttgggggaagggtttttgattttttattttttatttcgtgaagggcgggtatgtttgtgtcgcggagaatagggagatttggtattttattttttcgtgataggcgtggggattcgagttcgtttatattaattttttttgtggcgtcgttttttttaggtggtttttgtatttgcgcggatttttgtaagtgcgagggatgtaaatgtattttttgtaagaagagtgagtgcggggattttttttttttgtcgtcgttttttttgttttgcggagtcggtgttttattacg

SEQ ID NO: 11266 - DNA, 589 bp, synthetic construct
  misc_feature 1..589: note = Description of Artificial Sequence: Synthetic polynucleotide
  source 1..589: mol_type = other DNA
acgggggtaggcgtggcgtttttgggattgtcggaaaacgacgtgagggaaaaatttagaggttacgaaaaggcgaatagacggagggtttgttttaggggagttaagtagttcgtttgaagttttttatttggaaatgacgtgtttaattcggcgtttttgtagtttcggtcgtttttttttgtttaatttcgcgtttttttagtttcggtcgtttttttcgtcgtttttttttcgcggtcgtttatttttgagatttttggttttattgagacgtttagttttattcggtaattcgcggatattaagcgttataaatttaaatacgagatttagagacgttgggttttaaacgttttttagagtgaaagatagaggaattaatcgaggttcggttgattttagacgtttaaggcgataggcgttgttaagaaaagggggtgggacgatatttagttgttaagacgacggttttcgggtgggcggtttgaggtggttttcggtcgttaggcgagatttcgcgggaaaattttttgttagagagattaggagatttggggttgcggtcgtttttttcggagtatttacg

SEQ ID NO: 11267 - DNA, 848 bp, synthetic construct
  misc_feature 1..848: note = Description of Artificial Sequence: Synthetic polynucleotide
  source 1..848: mol_type = other DNA
ygyggygtattttttttttygtattatatatatatatatataygatgatatatatttttgtgtttttttygatgtaagtggtttygtttttygttgggttttaggtgtttttgtaggaaatgyggaggygyggggagtttagggaaygggtttggggttttaagttygtgatttttatttttatttygggttttagttttgyggygtyggttygtagyggatttatyggaygatgtygaatatgataagtaygttgtttagtagttttayggygtatayggtygagtagagygyggtgatggygattgttagggygagggaygaggygtttygygygtttggyggtttygaygtattggygttagygttggggtaggygttagggtaggygttygaggygttggygaagagygggggttgtagttyggygtyggyggagggggtyggttttatggttgtyggtyggtttygtygygtttttttttatygtgygttttgggygyggggattygaygygaggggagyggtaaggtagaggtygyggtttygaygtygtyggttgtygygtttyggtygtttygttgtttttgygtttygttygtttgtttygtygttygtatyggtttagttttyggygttygttygtttttttygttyggagygttgtgagttaggagtagtygtaggtttttyggaygygttygtygygygtattaygtggttyggaggyggtygttagtttgygttygygatygggggyggaygttgtattatyggttyggagttgggtaggggaggtttttygttttttttttagggatgtttygtyggttygagtgygatttygt

SEQ ID NO: 11268 - DNA, 1230 bp, synthetic construct
  misc_feature 1..1230: note = Description of Artificial Sequence: Synthetic polynucleotide
  source 1..1230: mol_type = other DNA
ygyggttygtattttttttgtttygygggygttttgygattttttttattgygttyggtttygatagaagtttagggagtagtggttttygygtttygtaygttagaygtggggttaggyggtaggtttttagtttaggaatyggggagttttttyggaagggtgtgttattyggagttagyggttttttaygtatttttttagagtgagaaygtaygyggygtagttatyggttygttttttttatygggggttttyggatttttaatttgtttggggttgtttttgtttttygggygaggggtttttggggatttaggatatttggttayggggaggyggggtatggggggtagaaagttagatggagygggtaggagaaggggggtgttgggaggagttaaggagggagagagggggygtgtatggggygyggagttaagagttatygagtttgggygyggtgtgtaggygagggttayggttttygtagtagyggggaaygyggggagtygaggtatttagygggtyggggaagaaggtgggggatttygyggaygtygaggagagggtattgyggagttagtaggttttgtagggagtyggagaggggttgagtagattttgaaggygggygggggaygtatttttyggyggggtagggtgttttyggatayggygagygygyggtatagttyggtagggtgatagttttttagygtygygtatagttygttygttgggggtttaggggtggyggttgyggtagggggtttyggggtygggatyggagyggygggygygattttygagtygggagttygggyggyggggttyggggtggtygtygttttttttttttgttgtagttttttgagtyggyggagggttatggtttyggygtyggaygttttttagagayggygttggtttttttyggyggggttggyggyggttgggggatgttagtygggygggtygygggtygtttttttttataggtttygagagyggggyggggttgggggygggyggggagttgtttygggtggtttygtttttagtayggaggatttttttygygaggygtygtygttttggagtttygtttayggygttygayggtyggggaaattgygggagttgggygtttagtgggggaaaaygagtygyggaygygaaggggygggatgaggttttyggggyggggttyggggttyggggttgygt

SEQ ID NO: 11269 - DNA, 1094 bp, synthetic construct
  misc_feature 1..1094: note = Description of Artificial Sequence: Synthetic polynucleotide
  source 1..1094: mol_type = other DNA
ygygggagtttttygagttttattggttttttttttyggtygtygttaygyggggygtygygtttttaygggtttagaygtttagttaatttttyggttttgtaaaagtttttgggggtgygyggggttgggygggggtgyggygtggttttttttagggtgggttttaaagtttttattttygttyggggygttgatatygtygattygtaagtttatgtygygttyggagygtygyggggttagtaygttygggygggyggttyggaggaggyggyggtayggttggggtattttyggtttygattygygatgaatggggyggttygggtttygtttttygtagtttygttyggaggtttygtttttygagtttttygtttygyggttttygttagtaygttgttygggygttttttaaattgtttayggagtyggatttygygttgttaaygtttygtttygggtaaggttgyggttttygtygggtttyggygttygttgtttygtaygttygggttygggaggaggaggtygggggagtygggtygggygtygygagygttgggagggttyggtttygtyggggagyggttttygagggygtaggagygggagtygggtyggagattttygygtagttyggtgatattttygtttygygttttagttyggggtttttaggtatygygygygtttaggyggygtattygtatttattttygtttygaggttygtttygttygttaygtyggtygtygttaaygagttttyggttygygtygttttagygttttgtagyggaggygtygtttttatttygatygtaggttygttygggtygttygttygtygggtatygagtygttttgtygygygttgygtttyggggyggggtgggaggagagggagtagtygttattttgtttaggtygtygygggttagttttgtagttagttttagttttgggtygggtgttgggaaggtyggaygtyggtyggyggtygyggggtttgtttttyggaggttggggyggtttaggttatagatttygtygttttygtattttttttttagttatttttagygtygt

SEQ ID NO: 11270 - DNA, 1979 bp, synthetic construct
  misc_feature 1..1979: note = Description of Artificial Sequence: Synthetic polynucleotide
  source 1..1979: mol_type = other DNA
ygtttatttttttygygtgttggagaattaattagtaaggtagggaatgyggttygtgggygtttggtttttttaagyggtttaggtttttagagygygaggtttaggggttttggagtygyggtygygaygygttygagggtygtttttttygayggtagagtaagagttatygygygggagtttygagygatygtttygttgtttyggtatttttttttygtagtygtttagagttttttatgtttygtgaygttygttagggtagygyggtyggaggtygggtyggaygtggttygagatgttygggggtaggtagaagattaygggtaygygataggtaatygtygtttyggttttagaggtggaygttttgtttttttgygttttaatattagattttgtttttagaygatatttttgttgttttyggtatttggaaagattaatygttaggttygagaatgtaagatttatttttttttgygayggaggtagttaatttagttgttygttatttttagtgtygtatgygtttttaygtaggattttgtttaatygttatygggaygtttttttagtttygttttyggatygttagagaggttgttaatttygttttttttttttattttattagygtattaatttayggygttgtgaygtgtatagtttttgyggtyggtyggggygggttaatggyggtggyggatayggygggttaatgggygggagygttttatgyggtyggttttygtygtagtygtygttgggttttggagttagaggtygttttgagayggtgygygatggatygagggttttagtyggggaggygtygtygtygagttygyggttagaygttttattagtagygttygtatygggagtygyggttttygttygagtygtgggygygttygaggggygggttygtttttygtygtttttygtagttttgtygggttygagttygygtygtygtygtygtygttttgtygttygggtygygyggttygggaaaygyggtygygggttgtatgggtagygttygygtttygtygttgagtygtygyggagtygygtagttttyggagtayggtgagaggygtygttggtttgggggyggtggtyggggygggtayggggtattygygyggttttgyggtttgtaggtttttttyggygayggagttgygtygygggttttygggygggtttggggggtyggggtygggtgggygggggtttttgggggttyggggygatygtgagggattaataatgggtttyggagygggtttaygggttygggttyggggtagtygggggtttttgggggttyggggtggtygtgaggggtttatagggggtttyggggggggtttgggaggtyggyggagtttgggtyggtygtaaggggyggaygggggtttygggygggtttgggtggtygggggttygyggyggttttgaggggtygattgggggtttyggggygggtttgggggtygtgggggttyggggyggtygtgagaggyggatagggggtttyggggygggtttygggggttyggagyggtygtgaggggyggayggggggtttyggggygggtttgtaggttttggggatttgaggttgtygggaggggttgttagggggygttggtygggygtygggttttgyggagttggggygtygatttttgattygygagaggggygttttygtygtgttggtygtagttgttatttttagygtttttattattatygttgttttgaaatgagagtaggyggttttygggtttygagtyggagggggagggygaattggggatttgggggygtyggggttgtaggaggygygygtaggtygaggaggggtaggaatgygggtagtygtgtggggggtgttagggggagggtaggygggygggtgtggggggtggttgggaggaaagyggtggyggtggygg

SEQ ID NO: 11271 - DNA, 1930 bp, synthetic construct
  misc_feature 1..1930: note = Description of Artificial Sequence: Synthetic polynucleotide
  source 1..1930: mol_type = other DNA
ygyggggagatyggggygygyggtaygyggygtttttatttgtggatgtttatttttygtggagggyggtgggttttgtygtaggagattttggygaagaygtyggttaygatgaygaaggygattatttygtaggtgatgtagayggtgaagttggttttgttttttttygggtygtatttgttttygggtttyggygatattattttggtgttgggygtttgtatttatatygggttttggtagttggtgtattggygttggtttagtttttygtggygttttttgtagtagaagyggtagtagtaggtatygtagtagtataggtagtygttttygttgttgttatattygaattttttgtygtattggtygtttaygtygtagtagttttagtaygtttygtaggtgayggtygygttggtygtygtygttatagtygtygygggttgttttygtyggtttttygttttygggatttygggygttygggyggtgtygtttagttygyggtygtttygtgttagggygttttyggtttttyggttttygayggtagygtygtttgtatttagggttyggttggyggygyggtygygggtttygtggaygttgggtagtaggtttagggattttagygagagtagtagtagtagtaggaggygtygtagygttatggyggggtygggygggagggygyggggaggttttygyggtaggtygttttttyggygggtygggttyggaggattygtygygygggtygggttggaggygttgagyggttagyggtttyggggygatggygttatygaggygygggyggtagtggyggyggyggygygyggtgygtayggatyggttyggygygggttgttygggtttttaggttgygygtyggtttygygttttttttgygggttyggygygttttttgggtagttttatttttygtyggyggtgattgyggtttygygygyggttyggtttaggtaggattygaagygyggtttygggyggyggyggyggyggyggyggygtggtttygttygggygggttttgygggataagayggggagtyggttayggggtggggygattggygtttygggagtaggaggagaatygygggtaggygggyggggagggtgygygtagttttygaggagagagattyggagtygggaggggygtagagttygtttttaagayggggtttygyggttttgygygtttggaatygagagygtaygggtygtttttttaggygtagttyggtygttygggttttttagtygttyggtttygtagygygttttygtygtaggttggttttttgggayggagtyggttgaggttggggttyggyggygagtygggagagygygyggyggttggattttatttatttattatgttyggttgygattgtagaggyggyggyggyggyggyggyggyggyggyggggygaggygggaaygtagttgtyggagygagygagyggagagtygtyggttygtygtttgtattagtgtyggaaygtgtgygagagtgagygagggagatataygtatttatatattygtatataygggagygtygygaggggaggggggataggggaggggagggtagtygtttttygttatttaygtttgtaygttygggygtttagggtgyggggygggggggattttttttygtttttttyggatygtagtagttgaagtttygygttaygaaagtttyggatagtagttattygatayggygaattyggygggygaagagggggtygggagtagggyggaaygttygttttgtagtyggttygyggtagggattgattttttttgttattgttttttttagttttygygattagtttttattttatyggagttyggggtagygygttgtttgagygg

SEQ ID NO: 11272 - DNA, 3177 bp, synthetic construct
  misc_feature 1..3177: note = Description of Artificial Sequence: Synthetic polynucleotide
  source 1..3177: mol_type = other DNA
ygtaggtggggtaagttygggttatygaygagatttgttygygttttygtttttattttggtgtttttttttttttttggtagttttttttttattygtttatttttygggtttatttygatttatttggyggtgggtttttttttttttygattttyggyggtgyggttygttttttttttgatttygygtttggtygtygtgtttygaaggatatgggttatagatygtgyggagatattagtttygygggyggttgttttggtttaagtagaagaaaattatyggggttagygtygggtayggtagttttttygtttyggagttygygttgttygggtttttttttgttgatttyggtttyggtyggttttyggttttygataggtygttgagtygtatgaagtttyggggttgtttygatttttyggygttygttttattttttttttygtttattttttggttagtyggggtttygggygattyggagaggggtaagyggygttttttagaggaggtgtttttaygtaattygggggtttyggygggggtatatttggtgggttttagggygtaagttgagttttygggagggttagtttagtttagttttttttgttygtaggggtatgttgttygyggggygtyggggygtagggaaatttygttyggygygagtttygttttttttgygtttttggggtttttygggttagtyggtyggtttttttttattttgtttyggttttttygtttygygtttaggtttyggttgtyggattyggygttattttyggygaagtygtttygagagggygaaygaaaaggggggtagyggyggagggygggggttyggggaggggygtttttttttttygyggygtagttggagtyggatttaaggggttagtatygtttyggtttygygttaggyggygggggaggggaggagggatttttttaggggtgggtttggagggggtgggggyggttttttttttygtttygtygygggtttattgttygggaggggyggggagatagtggggggtagtttygggygggagtggaggyggagatgtygtygtygtagtygtygyggtggttgtygttgtygtagttgtygtyggygttatagttttttttttyggtygagaygyggagygagygagygaaagyggyggygaggagtttygygtatattatagttggattttttattttaattttaagtttyggtttygtttttagatagtttygtagttaatygtyggaygtygtyggtttygagtygygygtttattggtygttygtygtggtagtgygggygggagygtagggagagaattatagttggaattygatttttattttaaaatttaggatygttttttttttttttttttgtttttgggttygttttygaaggttggagttaattagattgttgtttagatygaatttatttttttattggttattggggtttttgggatttttttggagggagttygaagaattagagtattyggygyggggttttggygtagggtygtaggttttaggtattttttgtttaygatttttgatttgggtagtagtyggaggayggagtttagttttgggygggtttggggaagaaaggagataggyggtaygggggtgagggttgttattagggggttttagagygaaattttaggtttttatttggttaattttttattttggagttgagtttggttgygggattgggggagggaaggagyggagttggatgttttgggggtggggttttaggttggaggggtttagttttggagaaaygggyggagttygagaaaggttagggtaggtatggtttgggygtggtttttataaattttttgggtttattggttatattttygagttaattttgagatttygattttgatttygtaattttaattygttggatttgattttatattgaygtttttgggttttatttttttgtttttagggattttttgaagggygtggattttaygtaggggtttygtgtttgaataygtggttttaggtaggtygygttggatygtagagttyggatttttaggaggggttgyggagtagagygaggatttttaagaaggaatttgtgggggtttygagtgtgtgggagggggyggaagtatagagttgggttttatygattygatttttaaagtttttattatygttattttttaatttygtgttttagttttttttaagtttttatgtggtttagggaaagagtgttygyggaattggaatttygygggtttgtygtttttatttatttattttaattttatyggtagygggttttygtgggtttgtgttttttaygygtgtataygtaygygtagatttyggtttttgtttygtttattttttygagttttggggtttagtyggttttagtttttttttgtygtyggygttattttagaaagttgtgggtattygggagyggagygtygygggtgtgttgggygtyggtggaggggggaatagygaggattagaygtygggaagtatttttttaatatttgygagaggtagatayggyggaatttagtgggttagttagtttttttttyggagattttggggygtttgygttattgyggagaggyggygggatgggtyggatgatttttattattattttttattttgttgaggttattatttttgggygttgtttatttttttaaggttgtattatttaygtagttttygygtatttttygttatygtagagggttggggtygttttagttttygtttyggtygatggggggaggggatgggggaagtggtagagtggttgttgygtygtygtttttttggttgttttttygtygaatttatgtatagagttgtgtaaatgaggtygggygggtttatttgtattttatgttaatgagtagattttttaagtgttttttttttttggygggagtttttgtttttattttgagtatgyggygtttgagttttgaatttygtgtygttttttgggaaaggggggttatttatggttgtttygygygtttgatatttttttttttttygagaggtygtagtttgtygggtyggtttgtttttttygttaggatagaggtttyggggttggygyga

SEQ ID NO: 11273 - DNA, 2195 bp, synthetic construct
  misc_feature 1..2195: note = Description of Artificial Sequence: Synthetic polynucleotide
  source 1..2195: mol_type = other DNA
yggtagagaggaygttatttaygagagagagtgatygyggatttttatygagaggtaggyggtggaggggttttttttggagatttygattatggagtggttttttttttttttagttygagtygtagygtygggtttttttatttttttagtttttagtyggttygggtttgaaaatttttagygatygagyggagttggygyggygtttttagttygtaggatgtttagttttttygtttttgttttygtttatttttygtygtttygattygattttttygggyggyggagygggaaggtagtagtttttatttgggattygtygtyggtttygttttagygtagygtttggggttaattttagttttaggyggggggygggygggggtgggagggaygyggygyggggygttgggttaggttyggttttggttgggatggyggggttygggtygggaygtagggtttgtttttttttgggatygaggttgagttaggygygttgggttgttygttttygygygggtttgtttttaggtagggttttttgttttyggygagggtgggttggagtttgtattatygttatattatttttatttagggygttaatygggygttygtygygttttaggtaygtgygtttygtttatataggaataaagtttgttyggtttttttygtttygatttatttttaggttgagtygattygtatttttyggttggtgagggagatgggagtttttggttttgtyggygtgtgggttgttgttgttgattgttaygttttygtatgygggygygygtatatttaygygtatttattttttgggttyggttttygtyggggtaattggtgtgagggtgtagttttgygtattttttatygygttttttagagagygygtttayggataygygyggggttattttggygygttttygtgggggatatttagtttttgttattttygttttggttttttygtgagatatattttaggtatagttygttgggagygggtyggagygaggygtatatttaagatagagttygtttttgttaygttttttgygtttttttttttttttagtttgtataygtggatatatygtatatygaggttygttttttgtaygtayggtttttttttgggatttttattagttattaagygtaygtgggatygttattaagygttttttttaygygtgggtygagtttagattattttggatygtgggtaaaggtttttttyggttygattatttygygttygggttttttgtgatygttttaggttttgtttaattyggagygygtttttttttttyggygttttygttttttgtttygatttgttttaattagtttttayggttttgtttttygaggtatagtgtttagygygattttttgggtttttgygtttygggataygttggttttgatttygagttygttttttttaggaggttaggtttttattagttttattttttattttttgtttyggggtggatttgtgggttgttattttttttttttyggttttaggaatttgttgaagttggatygtagaaattgggaagygaatttaggttggtatttatttagttygataaataagagatttttyggtygttttttttyggggttgttggtttygyggggggtggggtgygtagttttgggggttygtagygaggtttagttagttygygttagaggttygtaggggttgaggygtatagaggagggagaggttgttgggtttggttagggttttggagaygyggagggagggtagggygtygagtttyggggtgtyggtttttatgaygtygaattgtttgggggatygttagyggtgygtyggtyggagttagttggtggyggggygggyggttyggagtgtttgtttaattttgagygttygygagggggaggggaggtagttggttaygggttagggggtagtaaggtggaggagygggggttgggaaaggggagggtatttttygggttgtttgtttgygtgtttgtygyggtttaygataatygggagtttaaattttatgaattattyggagttgttggagygataaattttaggttggttttttttttygtatatyggtttttyggatttttggagggaatgtttgtttagyggtyggagttggygg

SEQ ID NO: 11274 - DNA, 2063 bp, synthetic construct
  misc_feature 1..2063: note = Description of Artificial Sequence: Synthetic polynucleotide
  source 1..2063: mol_type = other DNA
ygtttaaagtagaggyggtaattaggygttygggttaygttatttgataataggatagatgttgtayggttygttttttttataygtattatttygtagttygtagtatygttagaaaatttatttgattttagagtygtagagygtttaggggttttttttygtttattygtagtaygtttygggtttttttttttttttaaataayggtatygggtttttgtattaaaatayggygggttygygtttgttattattagtgtaaaatttgyggggggttgttyggaaaggatygaattttatygttgtatgagttttaaaagggagggggtatatttatttttagttttttattttattttygtttgattgtgatgtatatygggygtttgtatagtttygttttatattagtatataygygtttyggtttyggtygtttttygtygttttttttaaattyggtyggttyggggtttggygtygtaygygggtygttaggggttagygttygtttyggttyggttyggtygaataaagggttygygaatttttyggtaaagttgyggttgyggygaggagygggyggattgtygygtttatttgggtttygttttyggyggyggyggyggtttygyggggtttyggtggygygggtttggyggyggyggyggtaygaataatygttygagggtttygggagtgygygggyggygggggttygtttagygtyggygttayggatttaggtttyggygygggyggyggyggyggttgyggyggyggygygggygagtgggyggyggygygtttyggtaggtttaggttyggtttyggtaaygtygygaygygtttttttttttaygttyggygggatgyggtttyggyggggttygggttttaggyggyggyggyggyggyggtggtagttgyggayggttgggygyggggtygtttygtttttttygttttyggttygggygggtttgyggttattgygayggtgayggyggygggagygyggygggygttgggattgttttgttagggggyggttygggyggygtttaagattgygyggyggyggggtyggyggyggyggttayggttttyggggtygtygygttgaggtgyggagttgttatygyggttattttgttgttttaattgataagaattttttttttttygttttagttagayggggygttygygttttttttttygtttygygttggtttttaataggaagtygtttyggtttttagtaygtgatttttatygtatttgtatatyggagggygaattggttaatyggtattttgtatttgagtttttttttygygygtttttttyggtttattggtttttyggttaggttaygtttttttttttttttttaatattygttygygttgtggttttttgtatygygyggggagygygtyggggtgygagyggtgygygtttygagtggtygggaygygygttagttttgggagtttgtattgttygggggggttaygtggagatttgygtggtgttttttatygtygtygtttgtttttyggtttttgggygttgtggtttygygttagggtgttggygggaggggtgtygattyggttttgygygttyggtgggtttttygggttagygtttygyggygttygggttttatgttgtaattgygttyggyggygttyggygttygtatyggygygygtttygttygtgtygtgtataygttttgtatygttttattttgtataygtataygtataygagtttttggggttttggagtatygtgttygtttygygtttttyggttygtttttgygtttagtygttttttagggagygtttagttgygagtaaaataagtttygttgygaaatagtttttyggggagatagtttttttttyggagtatagatattatatttttatygygtaagttttyggttygggtygaattygggygtttyggygtttaygtattttaygattttttttyggtgtttygtaygtygtygtgattttttattttayggtttttyga

SEQ ID NO: 11275 - DNA, 816 bp, synthetic construct
  misc_feature 1..816: note = Description of Artificial Sequence: Synthetic polynucleotide
  source 1..816: mol_type = other DNA
ygtagtaaagagtttygggygttttgggggagagyggttttaagtttyggaaagtgggtagagtttttttttttagggttgagayggtaggygyggggtttttttyggattygtttygttaaggggatagtgtaggtygtgtygygatttagattygaygttttygygggtttygyggygttygggttgttttygtyggttgggagygttygagtggttttygggaatttatygtgaagtaggagggtygggaataggtatttgagtaggaggyggygyggttaggatatttttagttttgttttggggtttttygtaygtygygtttygatttggtgttygggtaattgggygygygttttgtttttygttttyggtygggtgyggtygggttaggtyggggttttaggyggttgtygygygttttatgttyggygggttaggygyggggttgyggggygygygttttttgggygtygtygggyggttgtgggygtttyggttyggttygygtttyggtttttttgtygttygtttygattttttygygttyggtttygygtttygtttyggtygtygtgtgygtygttttgagttgtagtggtygttatygttatygtagttgtagygtttttttatatttttagygygtygtyggtygggtagtttggtygyggtayggaggaggggttttggagggggyggtygggggaggygaygtygagttatygttttygggtagtygtygtygggggggagygyggagatttgaaagggygygtygggtaaygttttttttttttttatttygggygt

SEQ ID NO: 11276 - DNA, 368 bp, synthetic construct
  misc_feature 1..368: note = Description of Artificial Sequence: Synthetic polynucleotide
  source 1..368: mol_type = other DNA
ygtgtygtttgygttygtgggttatatatattttttttttttttattgttttttgggyggtgtggattagttgtagagtgtgatttgyggttagggagtgttttttyggagttttygtttttagatttttggtgttaaagaygttttgtgagygggtggggtygggygttttagttayggyggtygtygtttttttttttygtaggaygggatagygtttttgtggatygygttttagatgggttatagygaggtggtgygggtgatgttgttgygyggagtygatygygaygttgygyggaaygtgagtgttygagtygygyggttaaagagygaagtttttyggygygtttgtgtggagaaaaygg

SEQ ID NO: 11277 - DNA, 1411 bp, synthetic construct
  misc_feature 1..1411: note = Description of Artificial Sequence: Synthetic polynucleotide
  source 1..1411: mol_type = other DNA
ygtttttygygtttttttygygygyggtttttggagtttttgaggygygyggttagtttagttygggttygtagtatygggagtagttygtyggttaagygagygygggtyggggtyggggtyggggtttgggggygtygttttygggagtttttttgyggtttttgaggagygagggygayggygaggttgatyggggtygaaattatgaatygaagtttttataagttttagattttgygattttaygattgtagygtagtggaagttaagagtaaggtaagtttttygttygtttyggyggttttgygtttagttttttggttaatgaatggggygtttygyggagggggattggggyggygtggaggygataggygtyggygataattttttagttygggygtygygygtygtttygygggaygygtattggggatttyggtygtttttttygtttttygygyggatataaagttyggtagtygyggygtttagagggtygagggttatyggatagttygggtagattttggattygtttygygggagttgtttttttgttttaygagtgagaggygatyggggygygttatatattggaggggagggyggttttttyggggygagttgagggttaggggttgttyggattyggggtygtgggggggttttgggggttygggtygtgggatggttttggttaaggygtttttaaggttgtaaaggaggtttgttatttgttaggaggagatttgtygtyggtttygagttyggygttttttattygttyggtattaaatatttaggtattaggygygttttttygygtagatttagagtaygtattyggttttttttyggtttagatttagattaygttttttygggygygttttygggttagatattttattttatttttaygggygygtttttattttagatttttttattttyggaygygttttygttttagatttagtttattttttygggygygttttyggtttagatttagatttttttygagygygttttyggattagattygtatttagattatttttaygggygtgttyggtttttttygttgtttgygttygggyggagygtgttygaatttgygggtygygatgygygtttgggtaattggttggtaggatttggygtttttgttttttgygggggtggttttttygtygtagatgttattgtttgtgagggtttttttggtggatttygygggttgaggaggtgttgtagttgttyggggttttgygggagggggtttttygagtttttygttggttattttttgggagttgagyggttttttygtttttttttttttygtatttyggtttttagagttgtgggaaaggtttttaayggyggagtgggagttygt

SEQ ID NO: 11278 - DNA, 1487 bp, synthetic construct
  misc_feature 1..1487: note = Description of Artificial Sequence: Synthetic polynucleotide
  source 1..1487: mol_type = other DNA
ygggttttgygattygyggyggaggygtatagtaggygtttaaaygatygtgggtttagggtttygygttagygttttyggggttttttggagagaggtagggtttygtygtttyggttttygtaggaattagttggagaaaggygggyggtttggggttgaattttttttattttttatttttttygtygtttggagtagataygtygtygtygygtttttgggaayggttagggaagtaagtagaagtygggaagtygygaaagaggygagaaagtgygattttttttttagattttyggtttttygtygaaatttttgtyggtyggttaaattttagataatggaagttttaygtttttatttttatttttttttataagttyggtygygggtttttttyggttygggatttyggygttagtttyggagtyggagtttgtaygataygttttttttygtygttttatttttttattyggagatygtttatttttttygttttatttttttatttttygtttggtyggtttygttygattyggaggyggygtttttttttttgttttaggtttaggaaggaggayggyggaggaagtagggggttttggttgygggygtagggatgtgggtyggygatyggygttygagggygtaaaaaggyggttygaggattgygygygggygggtagygygggaagtygggaagaaaggagggygygygggggaggaggttgygggtgyggggttygaggtyggggygtttattttttygygtygttygygttygtygtttagttttygttgtaggttttgygygyggtttttygtttygttygtttgttgttgtagggtttggattttgygttttatygtttttagggagttgaggtyggttatggygyggaggygtagaggygtaygggtagyggyggaygttyggttgggttyggtttyggygagagttgtatagtygygtttyggttttttaagtttttgtttgygygggggtygttttygttttttttygtttttygggtyggttgtygtyggggygatgaggttattyggtyggatygtygaygttagtatygttgggggagggtttgaygtyggtatygttggttatagttgttggaaagtgttttttttygggatttatttggagaaagygttgggaggygtygttttttttttttttttttttttttttttttgyggtttttttygttttttyggtttyggggtttyggtttggtttygtygygggttttygtatttttgtataygtaygtyggaggttttttttttygtgagttttagttttttttgygygttttttaggttttyggaatatttatttagttygttttttgttttttttagttttttttggaggtgygttagttttttttttatttggggaygatagagygaggaaygggttagtttggggggggggttaygttttygaggtgtaggggygg

SEQ ID NO: 11279 - DNA, 602 bp, synthetic construct
  misc_feature 1..602: note = Description of Artificial Sequence: Synthetic polynucleotide
  source 1..602: mol_type = other DNA
ygygtatygttgttgtattttttttaaygtattygtaattttttttaaygtattygtattttttttaaygtatttatattttttttaaggtattygtattttttttaagttattygtattatttttttttttattttatgygaagattgtagtttygtagttttgygattagyggtyggaagtagttaagatgttattgtttttagtatgtttygygaggygygtatagtataggtttttttttaaggttattatttttattttygttgtatgttgggattgtagttyggtygttttgtgattaayggttggaatygtttaagatattattttagttagtatggtyggtaggagygtatygygttgtttttttttagggattygtatygttttataattttgttttgtgttgagattgtagttttgtaggygtataattaataagttgggtgtagataagagattatagtttttygtattttaagtaaaggttttttttttayggagtttttttaygygtttattgyggtttygtygtgttaaggggagtttggttgtttaygggttttatttgttagygagaagatagtttggtygggygg

SEQ ID NO: 11280 - DNA, 628 bp, synthetic construct
  misc_feature 1..628: note = Description of Artificial Sequence: Synthetic polynucleotide
  source 1..628: mol_type = other DNA
ygttttatygagaatagaaagtgygttttaggtattattyggatttygttaaattatattatttagaaggtagtgttataagggayggaagtygattttaagttatagayggaaggygtagaggggygttttygtagyggygtgggygggattttyggygtttagttttygttygtygttaggttgyggttgttgtggttgttaaygttatattgggtagaaygttagataggggttatttttygagatygagtagagayggatagtgaggaggataggatttatttataygtttttatgttagtygygattttatttttataagygtttgtaaaattttttttggggttttggygatagttttgtgtttttayggygygtagaggyggygtygygaattttgtgtgtattttataygayggyggggattgaggtttttygtagtttagagtyggagttyggggtyggtygagttygtaggatyggttttttygtygatttttayggttttatttagttttttgggtttatggyggygtyggygttggtgagtggagggtttygtagttygygygagttygggttatygttygtatgtatttattygttgtaatayggyggatgtygg

SEQ ID NO: 11281 - DNA, 215 bp, synthetic construct
  misc_feature 1..215: note = Description of Artificial Sequence: Synthetic polynucleotide
  source 1..215: mol_type = other DNA
yggttgygtattgatygtatttgttatgttttattttttttaatygaagttgaaggtyggtttygatgtttgttattttttataattttatygtagtygatagttttataaatattatygttygtttagttttygttttttygggtyggttgttatttygygttttyggtttggttttggtttygtyggttgtattgtayggttygttttttygt

SEQ ID NO: 11282 - DNA, 2638 bp, synthetic construct; identical to SEQ ID NO: 6771
  misc_feature 1..2638: note = Description of Artificial Sequence: Synthetic polynucleotide
  source 1..2638: mol_type = other DNA

SEQ ID NO: 11283 - DNA, 2172 bp, synthetic construct
  misc_feature 1..2172: note = Description of Artificial Sequence: Synthetic polynucleotide
  source 1..2172: mol_type = other DNA
ygygtaggttgtgtaygtgtttgtgtgtaygtgtttttyggtgtgtgttttagttttagtgtgttggygygtgttygagtatagatatatygggggtgtttgggtattygtatatggttgygggtggggygtagtggagaggaagtttatatatgygtgtgttgagatatggtygtatttttgtgtttttttagtttagaygtaggggagattagtatygagatattygagttygggagttttttagyggyggtygggyggagtttggttttaygtggggttggagagtaygtaagtttggagtttyggygttygtttttyggttgtygtyggtttttgtagaatygagtggtyggatggtagttygyggggaggttyggttattygttyggttygttyggggyggggagaagaaggagagttggagagagaatyggtygyggyggtyggagaggygagyggagtgtaagagaggygagygtttttgttyggygttygggygygtttttygtttttttygttyggttygtttgttygttggttttttttttttttttttttttttttttttttggttttgtttttttttttgattttyggttggatgattgaggtattttagaygtgggttgaattagagygagygagygagtttaggggttgtagygatttttygataagttatttagaggygattttgtgygygygygttttttagtggttttygttygttttttgattatgttgatatatttataggataggtagtagtatygatgyggygttgygaygttatagttttygatattttttttttataatttagttttattttttagtattygatttgtgaaaattaygtttatgtagtaatataattggttygaaagygttaaagagttaattaagaggttttyggtttttygtagtttatagygtagttygattttttagagtygtygagtagaygttyggtgaattttagaggyggyggagggtggygaggagttttygttttttttygtttttttttttttygatttygttttttttttttttttttttttttttttttttttttttttttttgttttattttttttttttttaaattttttttgttttgygygtttggatatagatttaggaagygaattygtttaygttttaggataaggaagagagagaggtaygggagaagagtttagtaagatttggattgaaatygagatatttttyggaggttyggagtagaggaaggaggaggagggyggygaayggaagttagtttgtaatttaagttttgatagygttggtagaagggggtttaaattagatttttttttttttaaaggagagagatttttttygttttttygttttttgttaaagtygggtttagtatagttgtagaygttattagtgagaaagagggagaggaagatagatagggggygggggaagaagaaaaagaaaggtaaaaagttttttaggagaattttttatatttgtaataaaagatttaggggttggagagagatttttgggaygtagggttggagtgtttatttygagtttagyggtagggttygggygygagtygagattttgttygtttttttygtttttgaaatygaygtttaggagyggttttttaaaaaygtaaggtataaggayggttattygygygattatgtttgttgatttttygttttgttttttttaaaagyggttttttattttttaaaagatatttttttttttttttttgaagtgtattagttgtgatttttgtttttttttttttttttttttttttttgttttgttttttttttttttttgaattatgtgttgttgttaaataataataaaaaaataataaaatatagtagttgyggatttgttttyggttggagtttagygtttygtttggagtggatgagtttttttatgagagattyggttatttttgggataagtatggtttattattygtttttattttatygggygtyggatttygttatgagygyggtgttgggttattagtygtygttttttttygygttgaygttgttttttaayggygyggyggygttttygttgtygggygttttggttaagtygattatggattaattggtgggggyggtygagatyggtatttygt

SEQ ID NO: 11284 - DNA, 2548 bp, synthetic construct
  misc_feature 1..2548: note = Description of Artificial Sequence: Synthetic polynucleotide
  source 1..2548: mol_type = other DNA
yggagttgtagtagaagygttttygatttygtttaggtttttagtttatttttttttgaaggtyggtagggggygttattatygttggttttttygygyggtttyggttttygtttygggaatygagtgtttgtagttygygattttggggaggtatagggttagggtatygtttyggyggagaaagtggttgtgtygygygggtggggtygggttagggttgggttgggttggagggygyggggtatttgagtgaagtygtagttttygggyggggtgtagaggagattttttgagygttggagyggggagagttagggygggggttaggygtygtagtttyggaygaggttygagtagtttttgygygtttygtagtaggtttagtagygtgtgygttagygagygtagttttgyggatyggataggagtyggagyggyggttagaggttggttaggtttttttttttttgtttttygttygggttygggtgaatagaattgatygtatygtygtyggygttgtaggtattgttggtgygttaggygygtataggygttttgggatttygggtataggygggtatagaaggygtagagtygggyggygtttgtttgtagtttttggggggggttttaggttagaagttttttgtagttgggttygyggttggaggaggttgttgygggygggataggggttagtttattttttgtttggggttttagtttttttatttttttttyggaaggagataggttttttygaggtagaagggagttgggaatgggtatgggtygggtggaaaygggtttgttttayggttgttygttggggtattggggayggggtattggaaagagggygtttatygtttatttgtttttggagttagtttttgaatattgttaygygggtgtagatttygggtttttttggtttttygtagtygtttttttaggaggtgatttygaataggatttttttagggygggggttaggtttagaataggttagggggtttttygagttattttgyggggttaagagagaggaygttgtatttatttgttttttatgaygtttgttttaygtttggtaggtgtgagtttgttatttgtgtttattttagggatgaggatagagaggtttagagaagtygagtgatagatagaygtggaaggaaaagaggtygtagtggttttgggaaggtttagtyggtttttttttattagattgggtttatatttggtaygagttaaygtttttygttaggtattyggygtagagtatggtgttggggygtagttygggttttagggtttttyggtaggtgtyggtgttgagtaggggaataygggttttttttattgttttagttttaggttygtttgtagggaaggggtggaaggtttaggtttggagggtaagagtttygttttgagggttttttttttattattttttttgatttttttttttttgaaagagtaggtagtatttttttaaggtaattyggtttttttatattttattatttyggatttttagttttttttattaygygtyggtttatttaygtttagtattttygaagagggygttttagttygygatggygtaggyggtttyggtagggggtttttggggtttttggggtaggtatayggggygygtygattttttygggtttatyggygtttatagttgtattagggttaggtygttgtggaaggttygygggttaaattgaggagggggaggyggygtagggttaaggaagtaygggtgggggtgyggtgtttagttttgggggtttggggattgtttttttattttggggtggggtaggatgyggtttattggtatttttttygtttgtttttttygggatttttttgttagygttatagtttatagaagtttattyggggygttgygggtygagyggtagttgagaygtaggaaggataggggtatatttygtaggtttttyggagattttgttttttygttygtatgtygggttttttttatttgggggtayggagggygggtyggggaggggtttygttttagagggggygaattygttyggtygtgttatttttttygggttggtattttggyggggygggygyggygttttgagatggggaagttyggggtyggtygtygttagggggtagtagagattatttttttygygygtygttygtyggataattyggtaggtgyggggtttagygtyggggattttagttgggtaaggtttgggggttttatttattttataaagtagtgygttgtygtgagtatttaggaggtygttattaggaygtygtygtatagaggttgttygtygagttgtagttttattagttagggttaggtttygggyggygtygygttgttttttaygatgyggtygtgggttygygttatattggtagtgttyggaygtttttygtygtayggttttagaaaggggtaaggggtgttaygagggatatgttttggttattttygttttygaggtttattygg

SEQ ID NO: 11285 - DNA, 919 bp, synthetic construct
  misc_feature 1..919: note = Description of Artificial Sequence: Synthetic polynucleotide
  source 1..919: mol_type = other DNA
yggtggggtgtgaaygggyggaagtttygtttagtgtttgtttaattatttttagtttgtggaggtygagygaatgygggtgtggggttygggtyggggtatatttaygygttgygttggtatygggattggatgtagatgagtaggygtaggtggtttygggggygyggyggtttttttttyggyggtttttygagygttgygggggagggtgggaygtggttaagygggygggyggyggggtgggygatagagygggygatttttttaygtttygggttttatttaygtgtagygtggyggygagagygtagaagttagttaygggygttttgtattggtygttggttaagtttaggttygggtygyggyggaaggtattttyggygtygggttgygaggggtayggatggttatttyggttttygttyggtyggatttattygttttttygygygtyggtatttattaggtagtagaygttaagttygtgtagygygygtygttttattaaygygtttyggygtaggyggtagaggaaagyggtttttaygygyggygttygyggtttyggggttaggggygyggttagtagtgttagtaygttttttattaygtygtygtygtttttttyggyggtggtygagatyggggygaggttygtagygatyggttyggyggggttataygtatagggttygggtttygygygttttygttgtygtatygtatttggtatagagygagyggtggtygygygttagggattttttattygttygtygygtgggtttagttttgaaygataggtgttagygagattaggggtttgtygggygtaggggtggggygagggygaygttttttyggtttgaagggtttyggagtttttgygttttgattttgtagyggttttygt

SEQ ID NO: 11286 - DNA, 2488 bp, synthetic construct
  misc_feature 1..2488: note = Description of Artificial Sequence: Synthetic polynucleotide
  source 1..2488: mol_type = other DNA
ygggtygagttygaggttgttyggaggtttagggtttttatttygygatgttagttttgtttttttttgygtttygggtaagggtttgttygtttgggggatygtatttggaattygygtggttttttttttyggyggtgtygtttttayggatagtgygtgttygggtttgggttggagygaygttttygagattattttattattttataattgtggttygygygtygttaggattyggttyggtgtgggttggyggagtataatgatyggyggyggggygggggygggtaygygggyggygggygttgggggtygygtagatgtttgggtygaataggtgagygtttttyggatattygggtgttygtggggggyggggaggagggyggagggggtgtaaattaagtggtgggaaagagataaaggaagagtgaagagygagayggtgyggatggggaagggggaggggygyggaggggtagtyggtgggtagygygtygaggagttygagtttgaatttgattaagtattgggggttttgtygtgggggtggggygggggtayggtygagagtyggttaygtgtttggtttttttagttyggggtttygtttyggtygttygggggagtygaatttygaggttyggtagtttygttttataagtattygygtttttggggattygaaagaygtatgggggtygaaggttgttygaaggggtttygggygtygagagtttttgagggtgtttgagttattttatttgggttaagttttttttttttggtttgatygtagatagttygtygggtgttttttttttttagtttttatyggatttagagatygtagttttygggagygatgggtaggtatagattttagygtttttttttygggtttagtttygtgtaaggatttttttygaagygttttttttttaagagygygttttttatygaagygtayggyggygygtttagygygtttttatttttttttatttggtttagttttttttttttttttttttttttttttygygttttttttttttttttttttttttttttttttttgggtgtttttttttttttttttttttttttttygtgtttattttttttttttattygttttttygttatttttttttgttgttttttttattttttttgtttgygttttttttgygtttttttttttttygttttygtttygtgttyggtttygttttttttttygttttttygtgttyggtgtttttttttttttttttygggtygyggygtygtygtygttgtygtygttgttygtttgggttttttttttggttattttygttttygggtygggtagtgaygygtygyggtggtgttagttttttttttygggtagtygyggyggtagtagtagtagtagtagttggagttgtggggttgttatygtygttygtttygtttattygyggatttygatygtttattttygtttygtttttagtttaggtayggagttyggttyggatttyggygatygggtygttttyggggttygggtygtygtttttttttttyggttgttgtygtyggtygttgagttgyggttaggggggygaggggttgggggyggttttggggaggggggygtagggggagttttttttgtyggggttgagggagggggygygggggagyggttgygttttgggtygagtgggttggggyggggggygggtgagtgtgttygagagtggagggggggygatgaaggttgtattgtgggggtygyggggygtttaagaggtgtgtttggttttgagygtttagggtygyggggygtattttattttyggggtgygygtygygggttttggggggyggtgattgtgygygtagygtygyggtattgtgttayggtygttyggtgtgtagygggttyggtatygygtttyggygagggaggygttttttggyggyggggygggggtygggttygggttgtygyggtygttaygagaagggaagtggattgtgtttggggatgtgaggaygggaagygttgagtgttagggaggggtttttyggygyggygyggggagttgagaygyggtttgtagagttgagtttattttagtaggttygggtttttttygggaggggayggggtgttttttttaggtgtatygtttgatyggaagtygygggygttggyggtttttggygaaggggttttttttaatgaggggatayggyggggygggggtagtyggtygtttygagggygygygtaggggttaagttggatttatattttygtttttttttttttttttttattttgtttttaaggttggatattttggatagggaggaggggggagtgtaattygtatttttattttagtygttygggagtagaagtgattttgtttttattyggagttgygtttgttygagttyggtygtttttatygggttgygt

SEQ ID NO: 11287 - DNA, 513 bp, synthetic construct
  misc_feature 1..513: note = Description of Artificial Sequence: Synthetic polynucleotide
  source 1..513: mol_type = other DNA
yggtygggtttgttayggggttttgtgtagttttttttattttttyggttgttagygtttygtttygtttttttttagtttttaagggaggaggggagagttgtagagaggaggaggggtyggggaggtyggttttataaaggyggttggaataattttgttygttagatttygtygttyggattttttgagttgttygttattttaygtgatygygtygttttttagttttatygttgagtgagttggggygygtttttatttygtttttagtttttygtygagtygygtggtgtattgaagtyggygtggggaggagagtygatgaaggagaaygttaatatgggggttttaggtagaatttttaatgggagagatttaggatttgagggagtygggagattygggagtttayggtttggtyggttattttttttttttttygggygygaggtttatgagatygtaagttattttttaagaatgygygtgtagtygttgtygtggtaaygt

SEQ ID NO: 11288 - DNA, 1766 bp, synthetic construct
  misc_feature 1..1766: note = Description of Artificial Sequence: Synthetic polynucleotide
  source 1..1766: mol_type = other DNA
ygttttttgtttattygygttaggtyggttttttttyggttttttttgtggygygagggatagyggaaattayggtagatagtatttttttgagtttaattttttttttttyggaggaagtyggttttttttttttatgttattttygggttatttttggataatagttgttatttttatttgagtygaagttaatttttyggggagttttygggygygtataggtagttyggtttgttttgygattgagttgygggtygyggtyggygtyggtttttttaatggtaaatgtgtgtggttggaggygagygygaggttttyggtaaaggtagtygagtgtttgtagatyggggygagttttgtgaaagtagataaaagaaaatatttattaaygtgttattaygaggggagygttyggtyggggttgtygtatttttygyggaatatttggttttttttagtttygagagaggagaagaagaaagyggaaaagaggtagatttaygtygtttttagttaagtggatttgatygatggtttttttgaatttattaygatatttgatttattagygatgttttttggtttgtgtgttaygtatatataygtgtatataaggttttggttygtttttttttttygtttttagtttttgggygaattttatatttgttttaatttttygtygagggygagtaggagygagagtgtgtygagtgagtgtgygtttgtgtgtttyggygagggtgygygttyggygtygggagygyggttagtygagttyggaggtatygggaggtygagagtygtygggattttagttttgygtttattgtttygttyggagttggatttyggggtyggggtyggggtygtgygtyggggataggtagggtygggtygygggtygygygttttttaggtyggaggtaaaagygttagygygyggagggttygaggagggtatygyggttgggtttttygygtttygggttttagtygttygyggttttyggttygaygtttttygtttyggagygygttygttttttttgygtggaggtyggygggtaggygagyggggggyggtagygtygtgttaaggggttggttggggtagygtggtyggtygggttggggygatttaagagyggttygggyggggtgyggagtyggattttggttggggyggygygyggggagggggtygggggyggtggyggyggygttggggggyggggaggaggtaggaggaggagtagtagygttygtygggggatgtagtagyggtagyggyggyggyggyggyggtagyggtagyggyggygyggagttttttgygtttagyggttyggtygggttgyggtagaggyggyggyggygtttygtttygggtgaggttgtyggggtygtgygygttggtgagtggggygtggggggtaggtgggtggttgggggaygyggggttygggygggggttygyggyggtyggagtttttttyggygtgagttyggtygygagygtygtttaggtgagtyggggttggttyggatygttyggttttagttttagygttgtttgyggaggtgggttygggygggygggagggaggtttyggygtyggtygttygtagagggatgatttgtttgatttygttggttggygggygggygaggatttttygtygygtttttgattygyggatayggtatatygagtataggyggtttygggtaggggagygygtttgggtyggttattygt

SEQ ID NO: 11289 - DNA, 6511 bp, synthetic construct
  misc_feature 1..6511: note = Description of Artificial Sequence: Synthetic polynucleotide
  source 1..6511: mol_type = other DNA
ygtagggtgaataggttyggttaggagtygtagygtygtttatttgtatttygtttatttggtgaggtatgtygtggagttttaggttttyggttaggttygyggtatttagggygtgtgygtggggtagtagtaggtyggagyggyggtaggtatttttgygggygtttatygygttygtttttagttyggagaggtggggtagtaggtyggtygggygttygtggtgygagggtagtttygtttttttttggttttggyggtygggttaggtttgttgttggttgtttgtgggygtyggttggtgtagggggttgatggyggyggygtaygttttttttagatgygagtaggggtyggtygattgggagtaggttagttgttggtagggagggggaaagtagggtggyggttgatattyggygattttagtgtgggagaggggtggygyggggttgtagaggtgttgttyggyggaggagaggtgggggattygyggatttttattgttgttttygtygtggygattttggagggaaaaaaaaaaataggagatttygttagtgygaaatttygttattgygaattggtyggtatygtygggttaygtagagggtttygggggattaatygtatttygttyggyggggtttgtttagggtyggaaggtattygggggtaatgygtttygaggatttygttgtaagtaaagagtgyggggagggaggagagtttggtgaaagatttgggggaaygagtttttaaagttyggyggygaaggtttaggygttgtttttaagttygaggygtttggaggygttaagttygaattttgggttttgggttagaaaagttygtggtyggagttyggggygaaggagttagagttyggggygaaggagtyggaygttyggtgtagagttatttygtggagttygtttatgaygtagggattgttggaggtggtagygyggtaggygyggatagagtgygyggygygggaaatgygtatttttttygttttygggatttttttttttaygttttygggataaagattttygagygggyggygttyggaaagtagggttygttattttgygtygttttgggaagtgaagagggagygygygtatagggyggttttttttgttggtygggtttagtygaggggagtaataagtgggggygttttgtattgttaagggtagtgttttygtaygtyggggygtagagggggtatgaagaattttggaaattgggtagttttgttygygtaygttttttygtttttgggyggttygatttagtttttaaaggatgygtttttatttgtttaggggtttyggggygtygggaatttggaggaatatggygttgtygttttttggyggaagygttygggtttgygggtaggggtagttttttagggttyggaggygtagtgaattttygygagttygtagttygagtttygygttttyggygtttttgagttygtttagygttgtttgygtttttttttttttttygttygtygtttttttttttttttttatttttygaaattttagtttaatttgttygataggttggagtattygygagtttttayggttttatttggtttygggtatttttattattattttttagtttttattttttttgaaagttaaatttyggttgttttygtgttttttygaggaggtagyggggtaggtgataagtyggttttggaggagtgttygttaaggtgtygttagtaggtagttttatttgatttttttggatagagatttygtgygtaaaagttaygtttgagggttgtagayggggtattttttygagaaaaygggaagtagggttgtttgtygtttaggaaagygttyggtaagttgtgtgggtgggatttgttattttttttttaggtttygttttygaggggaggttatttaggaaaaggttttatataggaaaggggtttygtagaaatggattaaggggtgttyggagaagtggatttygttttatygagaggttagggtttttatgttttygttttygatttyggtttagtggtttttgtttttyggattgttttyggyggggyggggttgtatttyggagttttagtttatttygtagtttttttygtatttgatattatyggttattttttataatatggygttyggygttttttaaaatagtygttagttaaatttaggatttttttagtttttaagyggtaaatttaaaatyggggttayggtgattaggygtttgtygtygttttygtygygygygggttttgttgttygggttattggataygtatyggyggttttgygagygtagatgttgtygtygygagtgttaagatygtttygyggayggggaaagtygygttygaatagtgtgttttggygatagtygggggattygagygttttaatgagaaggaaattattataattttttttygggggtyggygyggaggtttaggygtygggyggggyggtttttagttagttttagtttagtttygtttygtattygggtttggygtagygtygagttttaygttgtgagggaygaagygyggagttagtgggyggtgtttygttgatagtygaagatttgygaggtttgggtttttygaygygttttttttttgttatttttatygtaaatatatttgagattggtagagttgggggaagggatttaaatattgaaatttatttttttttygtttaaayggtttttattygtttttttaaaagayggatgttatttggagttaagaaattgygtatttggggagygatttaataatyggggtttttttattttttaaaaatatattttattttatttatattttattgaggtttaaggtttgagttgggattatgtagttggagttttagtgygttagagaygtttagtttttttygtgggtatagygyggtttyggttttygggygggaggagagaggaagggatttttggggagtttgttttaagggtygtagaggtagtagayggttttattygtttaggagttgyggatagyggygtttygtygttgtygttygaagtggtatttttygyggttggttgaggttagggggaattygygygtattggattagtttagyggttyggttttgttttgttttgyggaaygtyggttttgtagttgtttttggygggtyggttatttagaagtttttattygttttgggaaagaagygtygggtaggaataaaattygagygttaygggtaaggtgagggtgaggaggtgtaggaagttgggagagagtttgtagagagttttygattggagaggtagatatttaggttttatatgtttagatagaaaaygaaatttttttttatataaaygttgtttttttttttttttyggtatttgttatttaaatttgaaagtaaagtgtaatattaatttttaaaatttaaattaaygaaattttttggtttagttattatgtagtaattgatttttattgtaaggggaatatygttaattttygagggygtatttgttgggaygttttaattggttttttgggttggatttaaatattttgtggggattagaggataagattatttttatttgatattgaataygattttgtaataattaatgtttattagtayggtgttygtatttgtagtagatatgatttttttatttayggaatggyggtatttattgtttygttgttttttttygggttygtttgaattttagtatttatttagatttaggtgggtttaaaagaaaataataataataggygttttttaagggaaattttttttyggttttagatagtagttaaattttaggtgatttttygatyggaygygggaataaaatttggaagttgaaattattgagatttttyggttaagtatatttgtagggttttgtattaaggagaatagtgtataaaaagatatataggattttgatatttyggttttaaaataggtttttgggggtaaaataagttatygtagaagtagygtttttggtattagyggygggggagggggatatttgttagaagtagaaattagatttaggttygtaggtattttagagtataggtttaggaagatgggttttagattygttagaggtgyggygtttttttygggygtttgggattttttgaygggtgtygttgggttgttygatattttgggttttttagttttyggttttattttttgattyggtttgaggtgtagtttgaataagttgttttgtttgtgttggtaagtttattttttgtaygttggggttyggaatgggtaagaaggtgtttattttttattttaggttttggttttttttttttatagtaatattagttaaagttgttyggaggaatygatatgttttttygtttgggagygtttaygtaggaggygaagggagtygatgggtattgagggttygygtagtatygtgtygtgggtttaaaggatttagaggattyggaatygtttggtaaaggttatttatttttaaggagtttttttggatttyggygttgttttttttttaatgggtaagygttygaattggagygtaattttygygttttttgtayggaaggtagttagaataaattttttgttttttyggtaygggagatttttttttaataygtatattttyggtttttgggtyggtatttaggtaygygygygtttttgtgaggaagttttaatttttttttgattttaatttttttgtttagtagagtygggaatygaaggttttagtatttaagatagtttttttttaaygttttygttttttgtttaygtgaagaygyggattgygtggtygygtttaagatagtyggtatyggtagaaggggatttttttggaatttyggaggtttygtagtygtttggagaagaggatggaaggttgtygggggtttttttttatygttttttagggagtttaaatttatttattttttggaagttttggatttaygtttttatgaaatygtaaattaggtttttgtaatagygggagygttttaatagygygttatttttaaagaggygygaggtggtgtttttggaaatagggttttyggttttaggtttgagttattygttatttttgtttttattttagayggaagaaggyggttaggygggtagagtaagattygggtagatttgygattttttttttygttttagggaggggattttygagtagaagatggaggttttygagygttttygtagatttygygttaygygtyggaygtttgtttygtttttygggataaygtgagygtyggtagggattttagtaagtggtagattygttaggattaagtaaggtggaaaggtyggggtttgyggtaaatttaggaggagggggtatttaygttygttatttttttttygyggtattggtatttattggatygatattggygttaaagggtattttgaagtatttatgtttagtaagggtatgttttggggtattatagatattaagttatagttattttaaaataattataaaaatgattatygtaaataatagattgttttaatagggygygaagyggtygtygtatatagaygtttttggttttagttttattagatttagtttattgttygtttttttgygtttygygttaggtygtatgtttttygtttagaattttttgagttttaatttttttttttaaataatttttttttttaaataggtaaagtgaggygaggagttgaggggtttataggtttttaagttttygaggagggttygggtttaygttagtttyggttygttaaaygagatttygtgggtatagtttttaatttgataattatttgttttattttatagtaggtaaaagtgaatttttagtygtttaattatttgaaagttataaaggtgtttagggttgaaggttatttttttagyggttttattagggagttygttagagatatgtttgattttttttttgttttgtttygggggggattttygttygtyggaggttttataygtttggtygtgggatggtagatttttgttatttttttattaatatttyggagtttattygtaygtattttaatygttyggagygtaggttygaggattaaggyggtagtttygtgttttttgaggtttttttygtttygtgttttgggtygttatatatttttyggttaagttyggygtttttaatttagaatttggtygtttttaggygtggagtaggttattgttgttagaygttgygyggattygtttttttgygttagtattgggygataggtagttygggtagtatttaggagttattttgtayggttttaggygttygttttatttagygttatttttygtttttygtagygagttttttygtagttttttttttttgttagttttyggggtygt

SEQ ID NO: 11290 - DNA, 6511 bp, synthetic construct; identical to SEQ ID NO: 11289
  misc_feature 1..6511: note = Description of Artificial Sequence: Synthetic polynucleotide
  source 1..6511: mol_type = other DNA

SEQ ID NO: 11291 - DNA, 338 bp, synthetic construct
  misc_feature 1..338: note = Description of Artificial Sequence: Synthetic polynucleotide
  source 1..338: mol_type = other DNA
yggaaatttttaattygygatttyggygggtgtatygtygagtttttygggaagtgtagttttagygygagygggaygttgggaaatgtagttttgygygtttaygttttygatygggtygtgttygtygyggttttgygaggttygaggggtaagggagygtgtagygggggygggattaygaggyggyggggttgggggyggtttttgtgtttgygtyggggatygyggtgatttygttgyggatyggttygyggtgattttagygygaaygagttggttgtyggttggggygagaaaggtttgyggatyggtttgggygtatgygyggaaggygg

SEQ ID NO: 11292 - DNA, 936 bp, synthetic construct
  misc_feature 1..936: note = Description of Artificial Sequence: Synthetic polynucleotide
  source 1..936: mol_type = other DNA
ygtaggygyggggtgttttgagttttttaatttttagagggaaggagtttatygtgggggatyggttaaagttttattttttgttyggtttagggtaaatyggtttttyggtagtttagttygtttagtttttttygagaggatataggggattyggagttygtaggggttagtattatttttygtttygggtttygttttttatttttygtygtttygagaygtttygatttttagttyggaggtgagggtttttttttatgtaygggygtttgatgggggtaggggtggggaygtaygagagttttaggtttyggttyggatygttyggggttttaaygtttttttttygggtttaggaatagygttttygtaggaagtatttgtttyggagggggttttygggatgtatttygtygtgttygygttygatgttygtttttttagggtttygygatttttggggatttttygtttttyggtttagggggtatttatttygtaygtggagttygggtagygtttttagaygtatttagygggatatyggagaggaygtygaygtagtgtaaygtttyggtygaagygtygaataatatgygygygtygyggaggaggtgyggggygtgttygtttaggtagygggtygtttygaygtggtagaagtttaggaagtygtagttygygaaggataagttttagtygygttttgygtygtatatggyggyggyggyggggygggggygygggttaggatttgggtygggatygggaatyggttygggttttgattygtagtagtttygttyggygttygtaagygttttttattttgttttagtgtttyggttagggtatttttagygygaygttagtttygtttttttyggattatgtaaatgagtyggygggaggtttaatgagygggtaggaygt

SEQ ID NO: 11293 - DNA, 2184 bp, synthetic construct
  misc_feature 1..2184: note = Description of Artificial Sequence: Synthetic polynucleotide
  source 1..2184: mol_type = other DNA
ygttaygayggggattttattaygttgttttttatttaygttattygtttaatttaygyggagggttttgagggttttattaygtagttttgaaggggtagagttggggttatataggtatyggaagtttaygttgtggttttaggagaaggttttggatgtggtttttatgagtgaagggtggatttatagygttgtyggaataaagggaaattataggtaggagggaagygygtttaggattygyggttatyggttttttagattgttttttggggttaggtygygaggagatggaaagygggggtattataggttygtttgaattygygygtttattyggttatatygattttaaatttttgtatgygggtaggatttttggtttttttgygtttattttagttttgttggtygtyggggtatttgagggatggttgyggggggtyggagggtggaaggggygtygggtagtttyggtggggaggggaagaggtttttygtgtattatggattttygtattygggaagggaggygttyggggttggggagggaggaaaaggyggttgtgttyggggagggggtagygagatttygttygggttaygggttgtaggatggagyggaygggaggaaggagttttgaygtygyggattttaygtttgtyggtygttttttttttttttgttttttttttttttttttttttygtagaggtagygyggggattyggtyggggtggggttagggyggtgygtttyggagtttttaatttggattttatttyggaggygtygygatygygttttygtygtttttaggaaggtgttyggatygygtyggygatyggaggattttgygtttygtygttttttattttgtttygtttygygtttgtyggygatttygyggggtyggttttygtttttatttgtagttyggggygyggygtttttgagggaagyggggttttgggatttttyggtttgggygtgggatattttayggttygtaygaattttggtggttygggtttttgtttttttagaatagygtttaggtttyggagaaatttttygaagtygtgggtttagaygttttygggggatttyggtgggaygggtagggygggygtygygggygaggggaygygtattgttttygggygaattagaaatattttatatygggtatttttttaggaatygtttatttatttttattgttttttattaggttttattttattattttttttttaggtatttttttygttgtatygtttttaygygggtatygtttttattygggtatttyggttttgttttgttttggggtggtygtagttygyggggaggaagygyggygaggygtttatatygggaaagtgttttygtgattttgygaggttatatttygggtgygtygttgygggttygtgggttygtgggttgtagtttttygtttttgtygggtggaygagtttygggttygygtggagttgttyggttaaggtyggttygggaggggygyggygtagggygggtaggggyggggttttaggttaaygtttagttttagatttagtttygtygtyggatttatygtgtttttgtttttttatttttgagaaatyggaaygtyggyggtattttttttttygggtyggagtttgygtttttyggattgygygtttttgtttaggyggyggtygggggtgggagygygtagygggttaatttttttaaagggaattgtygggagggygtttagaagggaaagattaggaagygttgggtgttgagttggagtttggtttttttttgggggatyggggagggggttgaaggtggggagaagatygtyggggttgttaggggggtattgagggagygtttagggggagaattttgggtgggygaygtygtaggggagttgtttggtaggggygagggtttyggggaagtggagtttttggtygagagttgtatttgtggtyggggagggaaagggttataagggtagtgygygtygggagggaagtttaggtyggggggaagggattgygyggyggggataggtgygtygggtgttggatagtgagtaggagttygtyggtgtttaggttaygaaggtgttggagtygggggagttggaaygtaagggggttaagggaaygygt

SEQ ID NO: 11294 - DNA, 413 bp, synthetic construct
  misc_feature 1..413: note = Description of Artificial Sequence: Synthetic polynucleotide
  source 1..413: mol_type = other DNA
yggtttgayggyggggtygagtaggggaagtggaaggatggagggagaaagggagagagttttagtygtttyggttgtggtaggaggagttttaagagygtttttygagttygtttygtatttttaggtttagttyggygtaggttttttttttygttttttttattttygttagttgttgaaatttttttatygttttttygygggtaatagtgttygttaggygtygtygygyggtgtttygttttttaygtygttygttyggaaagagttygtagtggttyggggygtygygttttgatygaygtttttggggtttgggagggyggygttgagagttgggagaggygttgagtttttyggtttttaygggaygtygggaaaggagagygagygtaatttttaygtttygg

SEQ ID NO: 11295 - DNA, 403 bp, synthetic construct
  misc_feature 1..403: note = Description of Artificial Sequence: Synthetic polynucleotide
  source 1..403: mol_type = other DNA
yggttygygtygtygtgttttttattyggttatatagygattttaaaagtttagtttttatttygyggagatttygatagttttgggaggttttttttaaaagggaatttggagaaatttgttgttgagtaygattgagttttattttataaaatatttattatttygtygttattttttaagtttaygtttttaaatatgygaattttaaggtttagttygggagtaagttaattttaggattyggtttatyggygygtgttttgaaaagaatgtyggaggttagatttttttttatygtttagaggtttyggtttagygtatatatttggggttygtagggttttygygygtyggaattygatttgygttggattttttttygggygtaggagttaagyga

SEQ ID NO: 11296 - DNA, 675 bp, synthetic construct
  misc_feature 1..675: note = Description of Artificial Sequence: Synthetic polynucleotide
  source 1..675: mol_type = other DNA
ygttttatygtattttagtggagtgtygygaagttgtaattyggttttaaggyggttygtatttttattygtatataaaggtaggtygtagtttygtaygyggggatagggttagtaaggggyggggattttyggggtygtygttttygtagtttygygtgtgggattttggggygggtygttattttgtggtgyggtygtygtttgttaggagatatttagtaatttygtagyggttattttttataagaaattttygttgtaatygttgygttatattatygygttttttagggataggaaagttttttygtgtttggtgaagttttaggggaagtagttattttgtygtygtatayggtaaaattttttattgtygtagtygttyggttgaygtgataagggaggtgtaggttaatayggygatttygygttttttggyggtagtgtyggagtagyggygttgtttttgatttattyggtattyggttttygggatygtttggyggttgtgaatgtagagttggggygaygtggggttygttttttgggattgggtgtgagtttgygtagtgagttatatgggggttatggtttggygtgggggygtggtygggtggggtygttggatttggtgttggaaagttagggaagtagtygtgygtttaagaaygg

SEQ ID NO: 11297 - DNA, 580 bp, synthetic construct
  misc_feature 1..580: note = Description of Artificial Sequence: Synthetic polynucleotide
  source 1..580: mol_type = other DNA
ygaagagttyggttaataaagtaaaygtttygttttyggttttttttttttttgtaggggaaaygaattgaaygtttgaaaygaaggtggygyggtttggataaatttgatttttygatatttttygtttttgygttygttttygttaagyggggaggagygatygttataatggattttttygtaggttttgtgygygttgggaatttagttgtygtygtttygtagagttttttgttttyggagggygtttattttygggtygtttattattygygtagtatyggtagtygttgtttyggtagtttttagtygtttygttygtttgtggttaattggttttagttatttttygaaatgttagtygattttattgggtattggaagatgttggttaaygagaatttygaggagtatttgygygttttyggtaagygttgttygttgygttttgggygtttygtygagtagtttygggtygttttttagagttttttygagaygttgtttgtttgtttttatttyggygagtygyggttyggtgttttyggaygttagaaagggygttttyggttatygt

SEQ ID NO: 11298 - DNA, 858 bp, synthetic construct
  misc_feature 1..858: note = Description of Artificial Sequence: Synthetic polynucleotide
  source 1..858: mol_type = other DNA
ygggaatatygttttttygttagattttyggyggtttttttttttttttttaaatttatttttaaagttaagtgtaggttttttygttttagttagaagygttgygtgagtttttataygtagtygtaggtagttttttaaatagygttygygttgagtaaatagtttagaygtggggtttaggagggygagttgaggygatygtatygggygygtagyggyggygggttagtyggyggttaatagttagggygyggttygtttygtygttttttttyggggagtttataaggttttygtagygtttygggygtttgttgtttygtgtttttatygaygattttatttagttgygttaygygtygtttyggttgtyggtygygygttttgttygtyggttttygttygtaatyggyggtttagggyggattygggtttttgygttttygygagaagygyggygttgyggggtygtgggygtttgagttygygyggttttygagggtygaatatggggggatgtayggtgaagttttagttgttgtttttggygttygttttttatttttggaatttttgtttgggtgyggattyggagaagttttygagtatttttataggtgagtatttygyggttygtygttgtttygygaggttyggtyggygggggggtagtttatttatttattagttttttygyggggttggttaggtgagtagtgggggtttgttttttttttttaggatygtyggggttttttttagaattgyggtygggyggygttggtttttggggaagtgtaggggtattygttttygttgattttttggagttttyggtgaatttagygtgttyga

SEQ ID NO: 11299 - DNA, 5715 bp, synthetic construct
  misc_feature 1..5715: note = Description of Artificial Sequence: Synthetic polynucleotide
  source 1..5715: mol_type = other DNA
ygttygtatygygtatataggtagtggaygttygtttatttgttygtttgttgggygtagggygtttttggggtggggagggygtttttgtggggggaaaaggggygtttttgtttyggagggggaaaggaygtttttgtggaaggaagggggggtttttgaagyggtgtggtgagaggaygttttygaggaaggaagggggtgtttttgtagyggtggggggagaggaygtttttgyggaaggaaggyggygtttttgygggggttggagagaygttygygyggtttttyggtttagggatygttggttygygggttygtttttttttyggygttatggaaatygtatttttttygtttgtygttttygattttttttttttattattttttaaaygygattttaatttttygataagttgataagtgaatggygtagaggaygtttygtaaagygttygygagygggtgggatataggygtttttttygygtttttttgttttttayggaagggygygygtygttttygatttggagygyggtgttygygaattygyggtygygggttttggaattttttygygtttygyggttgyggggggayggagatgyggtygggagayggggaygggaaaygggggayggggatggggygygtttatttygagygygggagyggtygttttygtttaaaatggggatttygygtttygagagtayggttyggttygtygtttatgtttttattgtaaggtygtagttttygtygtygatttygatttttygtttygtttagtygyggtttygttyggygtttttttttyggtggaagtttaagtttaattaattgagttygaggygggagggaagggttttgygygtygtggttygtttygtttttttttygygttttttttttygttttgggtggtatttttttygtyggtatttataataagtygttgattaatgaggtyggggtygttttatttygttyggtygggtyggggttttygygggagggggaggggayggygggaaaygyggttyggggagaaaggggggyggggygggggygygyggttygttttygygagygtygygtygattggtygagygygtygttygtyggggggygyggygttaatgygaggtagyggggyggggyggtygygttgtgtgtgtttgygtaaygtygagttatatgttgttttgttttttttagtttagttattyggtgygygatgtgttatttattgtgyggyggggatygygaygagttygggtygtygttggtagtagtagtagtaatattagtagtagtagtagtttyggyggyggygyggatttygagygttygggygtatttyggtttttyggagygygaygyggyggtagtagtttyggtgyggtygygygygttttaggttyggtttygyggttyggggatttygattttyggtttagygagygygtttttyggygtygttygagagttygaggaggtagyggtygtaggtagtyggggaggggggyggttatygttygygtygggtatttttaggagttttagagygyggagggygyggygtygtygagyggtgttggttttygygggttttttyggattttttttatygtttgggttygagggaygygtgatygggygggyggtygggygtaagggtgggagggagtygttttygttygygtttttttygtttttygttttaatttttgggygtygggttygggtygygyggtttgaagygttygygatggygagttygtygyggtaygggtygttygggtyggygagyggagayggttttaattttaataataataataataataataattatagygtgygtaagtgyggttatttgygtaagtagaagtatggttataagygttttttygtgttgygyggattyggygygggyggygaygaggygayggygggyggggggtyggygtygtaatygtygyggttygagtattaygagagygagaaaaagtggyggagtaaggtaggygygtygaaaygggtgatygttttygattgttgtttgaatattaataagygygtygaygttaagtataagtatttgatygttttttatattaaggaygagtatttygtygtggtygtygagaaygagtaggagtaggagggttggtatygygygtttatygatttggttagygagggtygygyggtygtyggagaygygtttttygtygtygygttygtygygttttgtagygtttttttgttyggygttttgggyggttttgtyggygtygtyggggtygaggatagttaygggttggtggttttygttayggtygtttatygtgaggtgtggtaggtgaatttgaagtttaagggtttgggttagagtaagaatttgaygggggtgtatygtttgtgtttgtttgygygtattatyggtttygtgaagtttaattgygagtagtygtyggtgaygttgtagtttatgaatattygtygttgyggttattyggatagttttttttttatygaggtgggtygttyggtygttataggtttyggygagttgtggatgtaggyggaygattyggtggtggygtagaatatttaygagattattttggaggttatgaaggygtttaaggagtttttygagtttyggtygygtagtaagagttaatygtyggggtygtyggttaygtattttattagygttttyggygygygtygttattattatttggttaatttgttttttagttagaygggtttggtgygtygttygygtatygatagtttggtygttatttygtyggyggttaagtgtagttygtgtygggtgygtatygttagygagggygayggyggygyggyggygggagyggyggtygygggygttaggtyggtgtyggtggttgggagttttttgagtttygggtyggtgygygygtttttgagtygttygtatattttgagyggyggttgyggyggtygygggagtaaggtggygttgttgtyggtagggggygygttgtaatatagtygttttatgtttatgttygtggygtattygtygttygtygttattagtttyggttttttgtygtttagtagyggttayggttygggtttttattygtygtygttyggttygtattygtttttgtygtattygttgtattayggtttyggttagyggttttttagyggtagygttttygtttygggtttttttagygatttyggttttatgtttttggaygagtayggttttagtttaggygatttgygygttttttgtagttatygaagtaataygttygagtttatygyggagaygttttyggttygagayggyggyggyggyggtgagttttaygggtatatgattatggataggtttttgagttattgtggtygtttttatygtygggtttygggggaygyggtttaggatttggatygagggttgygtaagaggatttattttttgattaygttagttyggtagyggtyggtgttttagtttttttttgtttygttggatgaatatattttgatgygggttattttttygggtagygygggtygtttttgttygttttgtttygygtttttttttaaggtggtttattatttttatttagaggattayggagatatygagatyggtttttataggagttttagtagtaatttgggggtagaygayggttatatgtttatgaygttyggygyggttttygygggtagtgggagyggtagttgtaggagygaygattatatgtttatgagtttygttagygtgttygtttttaagtagattttgtagtttagggtygtygtygtygtygtygtygtygtgttttttgyggggtttgyggggttagtatttatttttgyggygggtaggatattttyggygagygggggyggttataaggttagttygttygtygagagttttttygaggatagtgggtatatgygtatgtggtgyggttttaagttgtttatggagtatgtagatggtaagttgttgtttaayggggattattttaaygtgttttttagygaygyggttattaygggtatttygttygatttttttttygtagttttgtatttyggyggggagtygtttaggggygttttyggttgttgttatagttttttgtttygtttttataaggttttttatatttgtggyggggatagygattagtaygtgtttatgagttttttygtggggygtattttggaggaggagygtttggagttttaggttaygttagggtttagttaggyggttagygttttyggggtyggttttaygtagtttttttattttgtagtgttttygttygtgyggtttagyggyggtygttyggagggttttttgggttagygyggtygggyggtgaggtttaygygtttgtttttggaggggttgtttagtttgtttagtatgtaygagtatttattgttatyggagtttaagagtttyggygagtatattaatatygattttggygagttyggggttygtttgtygtygttygygttttttttgttggygtyggyggtttygtttttttygtttttgttygttagtagttyggtttygtygttgggtttaggtatttygggtattagtagygatagtyggtagyggttttygtttttygattatatgaatttygattttagtttttttaagttttttaagtygggygtttygagyggttatttygtgggttttttggayggttttttgtttttygaggtttttttttygtattygtygttgttttygygttygttygygttttygtygtygtttttgtagtygtygttatygtygtyggtttygggggagttgtatygtttgtttttygtttyggtygttgttatygtttagggttygggygtygttttatygttgttttyggatatyggggataatggtgattatatygagatggtttttggtgtggtygttatttygtygtaatttatygyggttttttygaagttagaagttgttygygtggttagttygaygtygggygtgaagaggttgagttttatggagtaggtgtygggagtygaggtttttttgtaggttagttagttttyggatttttatygyggygttaaggttattygygtagattygtaggggggtygtygtygttatagtttygagatttttttttttattaygayggttattttygtgttttygtttttygtttataattttaagygttataattyggttttygtggaaaatgttttttttaggaaaagtagygagggyggygtgggtgtyggttttggagggggygaygagtygtttatttttttaygatagttgtagtyggygttttttttggtatygtagggtyggtygtggatttygggttagttygggggtttggtyggttgttttgggagyggtggatygtttatgygtagagagatttttgtyggtttttagaatggttttaattatatygttatygaygtgagggaggagttygggttgttattttagtygtagtygtygtygtygtygtttttttagtygggagataagagtttttggggtyggattygaagtttygggggttttattagygttgtgggygtyggtagtatyggyggygggtgyggggggtygggtttygg

SEQ ID NO: 11300 - DNA, 858 bp, synthetic construct; identical to SEQ ID NO: 11298
  misc_feature 1..858: note = Description of Artificial Sequence: Synthetic polynucleotide
  source 1..858: mol_type = other DNA

SEQ ID NO: 11301 - DNA, 247 bp, synthetic construct
  misc_feature 1..247: note = Description of Artificial Sequence: Synthetic polynucleotide
  source 1..247: mol_type = other DNA
ygggtattgtttgtygttagtataaygaagaaatttatatttaygaagattttagattttaygtgattatattatttaattattagygttggtttggaggaattygttgttaygtgatygttygtgtttaatgatygaggtttaygttttttagatygttatagtygttgttatagggtttgagtttgggyggygtttygtttyggtygtayggtgygtyggygttaatttttttygaaggtttygg

SEQ ID NO: 11302 - DNA, 224 bp, synthetic construct
  misc_feature 1..224: note = Description of Artificial Sequence: Synthetic polynucleotide
  source 1..224: mol_type = other DNA
ygtygttaagaaggaggaggagyggtaggaggygttgygttaggyggaggaggagygtaaggttaagtaygttaagatggaggyggagygygaggtygtgygttagggtattygagataaggtgygygtygggtyggtttygtttgygggaaggyggttttgagtttagyggggatttagatttygtttgggtggaaggggttgttyggaagaggggygggygt

SEQ ID NO: 11303 - DNA, 1174 bp, synthetic construct
  misc_feature 1..1174: note = Description of Artificial Sequence: Synthetic polynucleotide
  source 1..1174: mol_type = other DNA
ygatgtggyggggtttgggaaatgygttygttggagtatatygtagtttygygggttttygagyggygygygygggtygaggatttttagggtttttygygggtttttygagygtygtygtatygtttttgttygygttygggatygtttygtgggtttttttgttagggtygtttgygtygagaggtagtttaggttttgtyggggaygtaygggttttatttttgattttttagtyggagttttttgaggatttgtaagtatataggttggagtygagaggttaaattaggttttaggggatttttttaataaaattttaaattttatttaggttgttygtaggttaagygattgtaaggattttgagtygaagtagyggtgtygggtygattygaggttygttttttatygtttttttttygggtyggttttgtgtagttggggttttggaattyggtttttttygggttgtyggttttggggtttggtgttygttatttttttttttyggaggtygttattgtttttttattttatttttagttttttygtttttttttaygtttttttttygygtttttttttatttgaattttttttttttttyggttggaagaaaagtyggtaatgagaaattagtttagtgttagtyggaggaggggggtagataattttagagatatayggtaatggagagagaatttattttgtgtaaagagggtttygagttattagggaatttttggattgttttaggttgtygtgtgtgatgtttattaygtygtgygaatattatttgttyggtattgtgtttttagttgttaggttatttgttgtaygtagtaatatttgattgtttggttttaygttygtagygttygtttagaygygyggggygggggtygyggaggggygggygggagttttgattaagttatttgygaggggagggggygygggygtagyggyggtygggtaygaggtygggttgatattattatttgttggggygygggaagaayggtagttgttttgygttgtttyggygagggaygtttggaaaaggttgaagttttgggygtttttaagttygttatttayggggttttygttattttagtttgttygtygtyggtygttttttgtgattttttgttttttggttygtygt

SEQ ID NO: 11304 - DNA, 8657 bp, synthetic construct
  misc_feature 1..8657: note = Description of Artificial Sequence: Synthetic polynucleotide
  source 1..8657: mol_type = other DNA
ygagaygygtygattttttygggaagygygagygygygygtgtttgygtttttgtgyggatttgggtttgtygtgygygtgtgtgtaaaggtgaaayggyggyggagttttaaatattttattttygaattattttttgttgaggaattaaggttgttaggtygttgttgattttgaagagggttttttttaattgygatttttttaaggaattyggttttgtttatttttaaggaatgttttttttttttattttttagaygttgtaggtttttygygttgygtttttttttaggttggagtygtagttggygggaygygtygtttttayggtatgtygggtgagagtygtttaygagyggtttagygtggyggatttyggttttgagtygygyggaygtttggttaygaggggttttygattygggyggggagaggtgygatttggggggagggggyggggygygtaggaaggaggaggagagagaaaagggygaagttagygygagattaggaaggagaggagggtagagayggagtyggygagatgttggagaatttaggattgtgggtattttgagygggagagaaattttaggaagtaygtyggaggyggggtatttgtgggaggaaggtaaattttgtagagygttaaaggatgtygggagggataagttagttatggggagattttttagaaattyggagttgaaaatagggtagttaagtaagtaagagttggttagttgaataygaggtttttagaatgtaaattataaataagaaagaaagaaaygaaagaaaaagaaaagagygygygtagggtttygggtttaggygtttagagtagttygtgygggggttttttyggtttatagtagtygtygtttygygtttttgaagtggygttygygtggttattyggggattttttaggtttygggggtttatttgaaaatttygagaggttttgtatattttgttaggattggagttgyggggattttttagttttttayggatgtttttttgtaygtgttttttaggaaaatatttaggtttyggaagygtttttgagagtttagaaatgtyggttgagygtgaaatttagtttaatttatttatagagtattagatttagaaaygaygtttgaaagagatgtgggttttatgttgatttaaattttgttttatttataataaygtttttgtttttaaagaaaagaaaaattttttagttaaattttttatgttttyggttttttgtttttgtttygttttttttttygataaaygyggggagttttggaaygggagggtyggtgatygygaatayggtagygatgtgatttgatgtattgaaattatttatatttttaatgttattttattaaaggaaatttatataaaagygtttgttttattttaattgttaaaaaagtttgttatattttygaayggtaattgttttttygttagatatygaaagtttataaggaattataatgagaaaggattaggagtygtttaggttttattgaaatgtttygatgtygtttttttttttttttygaattaagtygtygggggaggaggtgggtygygtttatygttgtygggattygggtyggtagataygggttatagygttttttygtygttygygygtaygatttttggtttgygtygttttttttygttttygygatayggaggayggygtygygttyggygagygtttyggtttttttagtyggtygygttttyggggagatttygagttygagttttyggggtyggttgtttttygygttyggtttygtaggaaattttygttygttgaaatttgygtgtttaygtagattygttttaaattttttggttgttgtagggataataaagaaaaatagaaatagtgttaattttttttttattttttagggtatatttaggaaagggggtagggtttattaggaatttgaaattgtttttatygtttgggttattgtgattaggggtygygtttgtaaagtagttattgggttttttttgygtgtttgtttatttttttttttttgttyggayggtaattgaaaagttttagaagttaagtgtygggttttttttagygattttataggtttgagtatttygtttygtttttgagtaaaatattttaggttttttttttygggagtygyggttttgtagttttygtggtttygagayggagtttgggttgagttygttatttttttaggtagtttygtygggatygtygygttaagattttaygttggtagtatgtttttttatgattgattttttttttttttaagaagaagattaagttaattttaatttaagaagaaggaatgtgatttttttttttaatattagagagttttaaagtaaaaygtagtttatatattttaataataatgaygagtgttaagtttttaatgtttttgygtaggtattttaatttgttatagttattattaataaaaayggtatgtagtaagagtygattgtttaatagtgtaaggtagayggtttttattagtaataggtagtagyggtatggaatatatagattttagtggaggagtataattgttaaggggaaaatatatataggaygggaagaggttatttttaaatttttaatattgagttaaagagggggaagggtaggyggygtttttggagatgtattttgggtgaggggatttttttygttattgtaygtgtttggttatatatttaattgatgttagaatygattgtatttagagtagatattttagttttaaattgaggatgtttgtataataattggttgtttttttttttgtttttggtagaggttyggyggggggaggggggtgggttaagggagggggagggaggatgagttttaaatgttaatgaaattatagygggaatygttttttagaaatggaaatattttaggttagtgttttttggtgataaaaattatattygattttttttttatttaaattgatttgatygtaaaggaattttaaaggttgttatttgatttgatagtgtttgtgtttgttatttagygtgtgggttttttatttatttttttttttggaggaatttttttttaggaagygtaaaaatgtygtagattgtygayggtttgtttaattyggttgttttttttttttttttgttttttagttttatagtaattgattaaaaatatttgttttggattgaattaggatgttttatgtggagtygtaataaggttgaaatttttygttgggtygttgtagggggtttagtttgtgggaayggggtgtttgtgggtggagggagaggtggtygtgggtgtgtgtgygtgtgygtgtgttgagatggtttgaagaggatgtgtgtaggatgggggtgtggtttgtaggaagagtggtgggggagtagtgtgggygaaggggtgggtgggataattggtagggggygagtggttyggttygggagtttttggygggaggggtaaygtgtttggatygygtttatygggagtttgtyggtttaggaggagttatttttaagtatagtattgtagtttgtaattggtttttttgtatttggggaaagatagtttgatgtygtgagtgttttttttgygttttggattagattggtaattygggtttygtttttttygygtygttgtagtygtattatagggaggtygtaatatgttttgygttttgagattattaaggttgtttygtaggttgtagggttagtaggggtgtaggagtyggttgtaggtttgagttgaggttygttttaggttattgygtttttttttttttatygtatttattygagayggttttygaggatagaggtatttgttgggtgggtgtttttaataggttagtatagatttgatatttttttatttttttgagygttttttataggtgatttttyggagtgggtagttagaygtttttttyggttattttygagtggaaaagggttggagaagygtgatggggagagggttttaggaagttggggttttaggaattttygttaatygtttygtttttgagtttygtaaggtaatygtttttttattttagtygygygttatttgagttatttgtaatgtttattgtatyggyggygttaatttgagtttttgttygttttygaygtgattgggaggttttaggttttgttagaggyggtttgttaggtaataattatttttttagtgttttgataatataaatttgaaagaggagttaatttagaaaaataaaataaaataaaattttttaggggayggygtttttttagttgaagttttggygttatttttaatagtggaaagtygtaaygtttagggtttygggggttgygttgyggatttgggggtagaaagtttattttagggtttttttggtaattygtaattaaggygtttyggatttaggtttatgttgggyggagtggatygygaggggtaggygattagaygygaggttaygyggggagtttygggttaggaggtagagtaggttygggatygtggaagtgagagtygygygtattgttyggaggaagattygagtygygggygttattattttgatttttttatttttttgygattttyggattggatataggggtygggttttttyggggtgtatagyggggtaggttgtgagttttttaattggattyggtttggtttgatygygggyggtttttgtttagtttgtgagggtggagaagggggtgggggyggggtagtggttggaaggggygggggtygggtaggggygaagayggtggtyggggayggtgggagtyggtyggagtygggtaggggaygtggtttygagtggatgggagtgggaggggtgygygtyggggtaygtagygyggtygggttgggttgtaggttygygagtygygggttggggtyggagttgttagagaggyggttgygttataaaagtttgtyggtttttttygtygttygttttygtygttttygttttttttygtttttttttygtttttttgttttttttttggtygyggttyggaggttgtagygggyggagtaggggaggggygggttttygaatatgtagatgagygygtgatggatagttgygygttttaatgtttttyggaaattygagygttttttttttaattttttattttygattttagatttttttaaatttygatygtyggtttggygygyggttgygtttatyggtttygygttgttgtygtygttatygttatttygtygtygtttyggttygygggtygtttaggttagtattygggtyggtttgttttygtyggtygttygggtgttygtygtygygtygygtttyggtygggygtggatggagggygtygygygttttgttygttgttyggygtgaygygggtttygygtttygygtttattatgttttattygtagggttatttgtattaggygttyggttygttggygttttattygtgttyggtttayggygygtyggttttggyggtttygygtagygaggagttggygygttyggygtygggttyggygtttagtttttattygggttyggyggtttttayggygtaggyggttatyggtttygggagttygttgtagtattyggtygaygtygtygtygtygtygtyggtttttygttttatatggtaatygggygygggygggaygygggatttttgggygtygggatttagayggggtttaggyggagyggggttygggttyggygggygggggtygtygggaatgtggygyggttggygatttaggagtygtyggttyggttggtygtttygtaggttgagtygggtttygggtggggagggtagygyggtaggyggggaygtttttgagttyggtygggattygygygtttttygygygttttttyggttygtyggttgattttttttgagagtttgggaagtgygttttygtyggggtyggggtttggygtygtttgtttttggttttygtatygtagtttggggaggygttyggagygggttgtgtgttygtttgtattggygtggggygygagggttygygttattgyggtttttgagtygayggtygggyggttygtatttattygyggggtttagggyggtgggggttatygagttaggtttaggagtygagtatttagttgyggtttyggagttyggttygaggygtttaggtttyggttttattttgtttagyggattatgtttttaaatatygtgtttgygggygygtgattygttaagggtygtttgagtttttygtggttygagygtagtttttgtttyggygatttgggggyggttygygagtttygaggttattgagttgggttaggttygggtygyggygaagtaygttaygggygattgaggttattayggggttgtygygattgtyggttttyggyggaatttttgggtagygatygagtygttggggttttggygaaggttgtaaatgtttygaatttaaaygttaaaggatgaattaaaatgttaattayggygtatttgaagaattygaaayggtgattggtttttgagttgtaaattggatttgtttagttttagagtagtgaatagtgaattgggggttttggggtgtttttttaattatataagggaggggaagagggagtagggggaggtagtygtattttaagtatttgtagaaatttagatattaaagagttatttgtgggtttgtgtgygygtaygtgtaagggtttgtgtatattgttaygagyggtttyggaatatttaggggaagatgggttattttaggaaagtgaaatagtttagaaattygagaataaaatttyggtattttttgtgattaatagttggtttygaattatattgygttttttttgtttttttgyggygggaagygtagttttagagttagatttayggggggaayggtggtygtgggygggyggaggggtggtattttttggttggttgttygyggggttttygtatattttatttataggtttttgttggttttagggygtattttaygaygygtatattatyggtatgatyggygttattagttattattygtayggtagygyggtttattygtattagtttaaygatttygygtatygtaagaaygttaygygggaygttayggttatttttaaggtttggtttaaygagtatygtaagaatttttattttattaagggygagaagattatgttagttattattattaagatgatttttatttaggtttttatttggttygttaaygygygtyggygttttaagaaggagaataagatgatttgggtttygagaaataaaagygaagatgaggaygaggaygagggygaygttattagaagtaaggaygagagtttygataaggygtaggagggtayggagatttyggtagaggaygaaggtgagygggtagyggtyggygtaaggtttyggggygttttttttttaggyggggygtagagttaaggyggggaggaygttgttygtyggatattttaggttygggtyggagttttagtygtattatattgttttggggtygtygggatttgagygagygatttttygggtttttttyggggaggttaggtttygtttgttaygtggtygggtgggggygaggtgaggggtttygtggggagggtttagtgtygtaggatagggggyggagggggttttaggtgtttgygttgttttttygtgttatttatygtgttygygtttttatagggattagtttgtaygtggattygtttayggattattygtgttyggtygagtyggayggggagaagttttygtgtygygtyggggattttttgtgygaatygggttyggagtgtaaggataagtatgaygatttggaggaygaygaggaygaygaygaggagggygagyggggtttggygtygtttaagttygtgatttygtygtygtttatyggtttggaggygtygttgttgagtttttygttygaggtygygtttygyggtggtygtaagaygttttagggtagtyggaygttttygggygygtygtttttygttagtaagtttaagttgtggtygttggtygagatygttaygtyggattttaagtagtygagtttgggttygggttgygggttatyggggttgttygyggtygtygygtyggttttaatyggggtatygttaggaggttygttttattttgtttygtygttgttgggtygttttttttattataygtygtttttttayggtaattatataaattaygggaatttgaaygyggygttgtagggttagggttttttgyggtataattttgyggtygyggttttyggygaggttttgtatatygygttaaaggyggttagygaygygggtaaggygggygygtattygttygagttttattatyggttttygggyggyggttaygagtttaagaaaggtaggyggttygyggtyggyggygttygggaggggagggagagttagtttyggggaggyggagygttygggagattygagggagggttygg

SEQ ID NO: 11305 - DNA, 1059 bp, synthetic construct
  misc_feature 1..1059: note = Description of Artificial Sequence: Synthetic polynucleotide
  source 1..1059: mol_type = other DNA
yggatygtttttttttattttatttttygggtttttattgtygyggttttgttttattatttttagttgaggggtagttyggagttttatggttttttttttagagyggtygttttttygggtttttttagagttttygaagagtygygtgaggaaayggggatttgttyggggtagtagatttttagyggtgaagaygtagagtatygggttgaygttagaattgaagaaggttaaggtygtagttttygttygygtygtttggtyggtttygtttagtttygttaaggtttttttyggtggagttagygttgygatygtttgtagaaggttgattgygtggtagggggtttagagtaagtygaaggtaagtaygatggygtttattagtyggtttattygygtttygtgtygttyggagttttagygggygtttygtagtygtgttagygttaygttgtagtagtygagtattagttygaaaggaagtaygaaagyggttagagtttttaggtttaggtgggyggyggygtggatyggygaygggtggtatagttggtataygyggtttttttataggtggyggtagayggyggtygggayggygagtaatagggyggttagttagatygttagtagtaggyggygggttagggtygggttgygtagtygaggygttaggaaggggygggtgattgygaggtagygttgtaggttgagtaggtyggtgagtagtaygttggygtatatgttgagygygtataygtagtatatygttttgtagttygtttggtttagyggttaggtttgtygggttaggaaggttataaagagyggygtgagtagtagtatygygtygtyggttagygttaggtgtagtataagygtggtygttagyggtygttttygtgtaggtygttagttygttaagttttatattaygaagtygttgttaggtagttttagtagygtygttagtagtaggaaggttgtgtttgtggttygygaagttttttagtttagtagtgtttygttttttgggggayggtagtagatyga

SEQ ID NO: 11306 - DNA, 1663 bp, synthetic construct
  misc_feature 1..1663: note = Description of Artificial Sequence: Synthetic polynucleotide
  source 1..1663: mol_type = other DNA
ygtaayggggygggggtagaygtttttagttttagaatttygtygggtttatygtttagtgtggaygatyggygtttttaygagatttatygagggtatatagtttttattttagttygttttattygatttagaygatygttagygyggttagyggttagygtatagygagttgtttgggtaattgtggtyggattttagggagtaagttggtttygggttttatttagttttattyggtttttatyggtttttttatttaggagttggaggatggtttyggggygttttagggggattgttggttttyggagtttttagttagaygygttttgttgtgtgagtygygtgygygtttaatttggaggtagtygttttygtygttgataggtgttgtttagagggygtygggtgyggtttttggygtagttggaygygtaygtttyggtgygtgtagtttttygagttyggttagagagaagagggagttagggygyggtttgggggaygttagtggattggagtygyggagtttygagggaaaaattttgtaggygtygyggtygggattyggttayggttttagtttattttagtaggtgygggaggaagaggtagygtyggagtttygaggttagagagtttyggyggyggyggtygtttttttttttygagttggtttgaagtygttgggtattttyggtttttgttgttgygttygtygtygtygtygtygttatygttagygtygtggggattygggaggaggtgtagtygaagagggaggagaagtaggaggaggaggaggaggaggaggggagaggaggagtagggggtggaggatggagtttygggttgtygyggygggygagttagagtygtyggyggygtttttttttttttaggttyggttttggaagaatttgtagttgggggtgggtaggagtaagggyggygggggygggygygttgggggtttagagygtygtattgyggatatttygtygtttttttygttattttyggtgggtatagggaatgtatyggttagggggagtggtgtaggtagtaggtggagyggttttaagaagyggaagtaagtgttggatygagttttttttttttygtagtttaatttgtgttgttygtygtyggagtttttggagttyggyggygtyggtagagtygagtaggggtttaygttaygtygtyggattygygagtatttgtttttygtygtaaaggggttygyggyggtttygggagtagygggagggaygttttttggyggaygttttttygatttagttttttttttttttttygttttattttttttgttttttttgttttagtttttttygaggggggatygygttygagatgagggtgtayggygttagggtttyggggygtatttgtgttattagaagagtttttttttgtygggtatygtttgtttggagtagttgttggagtygtygttttttttygtagagtyggygyggagtttygyggagtttygggtttyggagaygggygaggagtayggtagtagttaggtgagtgtyggtggygyggtyggagataaggtgygygggattaygtttttttttttaggygtttattattyggggagyggggggygggggtygggaggygg

SEQ ID NO: 11307 - DNA, 2065 bp, synthetic construct
  misc_feature 1..2065: note = Description of Artificial Sequence: Synthetic polynucleotide
  source 1..2065: mol_type = other DNA
yggagtaggtygaygagagatttttgagaaggttggtagattatygyggatttttgtttttttaygtggagttatgggygaggygtttaagaatttgttgaaggagttygatttttttaagtttygggttaggttttggagtatgaggtygttagttaggaygtttagaaatgtattggtggtggaattgaggatggtggyggttatttgtayggggygtttggtagtaagattgttatttttattatyggtygtatttggtttygtggtgtttygtaggtttggatygttaagaaggyggygtagygygtaygaggagtygggtygtaggtattggtaggygygaygttygttgtgattaygtaygtgtatttgggtatttagaygtattattagtagtayggtagygttttygtggtygtgtagtgtagttaggtgtagyggygtgtagtygtygtgggagygtgygtttaygtygattggtgygttattgygtygygygatttttattagttgtagygttatttygtygtygtygtttttggyggtttaatgtagggtygtgaagttagatatgaagtygygtttggtygttaagtygyggtygygtagtagtagttygtgtagttggtgggtttagyggttttyggtagttygtaygagttattygtgttyggayggttttaggggtatygyggayggyggyggygyggygggtaatttttyggygttagggtttagtagaygygggtyggygygygataggygttttaggtgyggggagyggttygggtttaggtygaggtttagatyggatttttttatygagagtygttttagtagtagaggggagtttygygggttyggttttttygatagttgtyggygtaggtygggttttttygttyggaggyggagygtggygggggtygggaygtagygtatyggtagtatatagggtttttgttgyggyggttttttygttgtttygggttygggtttygygtttggyggattagagtagggygatgtygttttagaaggggttttaggyggtggggtygygtttgyggagggtttttyggtggtttgggttagtttaagggttggaagyggtgggtyggyggatygtttttygggyggttgagygggttyggaggtyggttttttyggggtgttttgtggttttgttggtagatttaggttttttggyggttttattggtygyggtattyggattaagggyggagttttyggggtagaggygtttygyggtaagatygtygaagtgggtttygayggttgggtygttgttttyggggggtygaagggtgygggttygggtttygggggtyggggttttttttttagtattaygaatttgaygtygtygagtttttttattatygttaygttgttgaygaattgtttgaagyggtttttgygggyggygyggtttygygggtygtyggtatygagtagyggtttgaagyggtttagtagttyggagttgygtattttttygtygtgtttttgtaggaagtttagtatygtygtttggtttatttyggtagtygtagyggyggyggyggyggttagygttatggtggggttttgggtttttggttttyggggygggtgggygtygygtygtygygggaygygygggagyggggtttygggaggygyggtygygtttatttggtgtttttttygyggttagtygggygtgttttygaagttggatttyggtygygttagtgtygttgggtyggggygtttyggggygaagggygtygggggtygyggggagygtttatttttagygtttygtygggtttyggttttyggggtaggtttttgtttttgtattttgtttaatgggygtttgtttttatttttygygtygygttygttttataggtgatagttgttttygygatgtagagggaatyggagtagaaattttygtygtttttygttygttttagaattaaaggygtagygttttagttttggtttyggttgttaggtgggtgtgttttttagggaygtygyggttygt

SEQ ID NO: 11308 - DNA, 3487 bp, synthetic construct
  misc_feature 1..3487: note = Description of Artificial Sequence: Synthetic polynucleotide
  source 1..3487: mol_type = other DNA
ygygygtttttagttygtttttggaggtagttygygggatygtaggttggaggygygtyggygtgatttygatygtyggagtygggaggaggagtyggaggaggttgyggggggtttyggtttaggygaaggaagggtaagaggttgttygatygggggyggygtygggaggtgggtgggtttaatatttaggtygggggaggggtttaagagatatygggaagggtagtygagttttaggggygggtggggtggtagttgtgtgtagtaggggatagggttgggtttttggaagttagagtgaagtttttttggttgtttygtaggtaattttattttttggtagaatagttgygaatygttaagttgatttttttygttttttggtygagaggagaggatgttttaggatttagggatgggygggaagaaattatggggagttataagtttgtatttaggyggggaggaggygggygggygtygtttygtaggygtaggygagtgggtgggaagaagggagggagagggaggaaggaggtgaggtygggaagatgttattgtygggggyggggyggggtyggggattyggtaaagggattgtagtagygttaggtgggggygggggttgtaatgttatttatttgagagttaggtgtgtgygttttaaayggggttygttataagtyggtatttttttggtattatttatggtgtagggttttaggtagagggttggggattgyggattygtttttgaagygggaygygaatyggtagagttgggagaaggtaaataagggttaygttttttgtygtygtttygygggygygtattygtygtttyggtygtygtyggtatatttttatttttttagygtttttttttagttggattatygygyggtttyggaggtggaggttgttttygattttagtttttatttttggygtygaggtttygtattttttatatttatttggaaagggtgtttttygtttttttaaaaaaattgtttaatttgtgtagagtttttaattttaggagtygagtatgttgttttygygtgtagygttygygtgtatygggtygggagagggggygatagggyggaggyggtggttttyggaaggtgtttgggatyggatyggttgtaygtgagtttagygygaggttatgtgtatyggtttagttyggttyggygttyggaygtgttgygtattaataaaatgaaattyggggagataggagggtagatagttttaggttttyggagttttygttygggtygttygatttttttatygtatttatttttygtygtagtttttaygttyggtyggagttygyggggaagttgtagttttggygygttttygttygttygygttttttygtyggttygggggygttttgtygtagttattaataaagaaggtygttaagtttatttttttaaaagttgttgttgtatgygttttttttagttttttygtattgtattttttaaaataygattgattaatatgygtaattttttttttttgtgttgtgtatttttttttttttygygttggttttttagaataggtagttagtaggagagagagggagygagygagtaagagagagygagggagygaagagygttggtagatttgttgtaaaaaygttaaataaygtygtggagatgygtagggtttattygtygggggttggattttattttgtttygyggtgtttttttgaygggygttgttttyggttaygygtygttgtagggatyggygygggaaggatgttttygaagtygggagtttttggggtyggygygggagggyggggggygygtatttattyggggtygyggygagggaggyggtygggttygyggygttttaggttttaygtttttygtyggggayggtyggttygtaggatttaagtyggtgtygttaggagtgggygtaaagtaattttatggaygttatttattttttttaaaaaatagtttttaattgygatggtygyggtyggtattatttattaattttttgtgtatgtttttgtttttttttaaattaagatttttttgtgatttttttagaaaaaaaaaatgtgttggggtgggggtggggtgggggygggtaggaggagygagggagggggagtagttattttttttttatttattyggattttygttttygatattttygtygtygtttttttaatttttygtttagttgtttggtttyggyggggagtttaggtagygttgygggtttygtgggggaagggtgttttttttygtagttttattattaygtttgttggtattttgggttyggattttttatggattttggggygtttttagttygttttgtttttagggtygggttygagyggyggttgygttygtgtaagttttattaggtttgtttatattttatatatttatatatatatttygtttttttatttttttatttatattttttgtttatatttygttttttaygygttttagattygggyggygtttttygtaattttaaaaaaaaaaaaaagygagtttatatttaaaaaaattttttggygttatattaatgaygtatttaaaatttgttatttttttttgygttaaaaagaygtttttttgtaaataatagtttggaggygatattygyggagggaaygaggtttgtattgagtatttygtttttyggggttttagygttggaagattttygttttaggttttgtttttgaatygttggttttaaaatgygaatygaataaattgygtggygttttgtagtattagaagtgagtagaaagtgttggtaggaggggagtggaggggygaaygygagttttggggagggggygyggttttttttttygtatttattttaaatggaaaattaatatttygggygggggaatttgaaattgtaggygattttaagaaaagaggggyggttygtagagagggtttttattgggttygtygtttttttttttttttygggtgttttttggygtttagygttgtttygtattttyggggggtggagaaggtagtgatgagygggtgggtgggtggttgtatattttggttttagtaggattttgtttyggggygatttttttttttttgttttttttttttattatttygaaaggttaaaaatygaggggtaatttttaaaggttggtatatggygaggaagyggggygtttttttttttatttttygttttttygttttttttttttyggttttatttttygatttgattttgtggtgtataaatagtaygttyggattttygtagtttttggaagaagagtttgygttygttaggygggygggttgtygggttgttagtyggyggtggyggggttttgggtttgttttyggagtygygggttatatttatttaattygttgygttygtygagtttattttttttyga

SEQ ID NO: 11309 - DNA, 847 bp, synthetic construct
  misc_feature 1..847: note = Description of Artificial Sequence: Synthetic polynucleotide
  source 1..847: mol_type = other DNA
yggtygttttagtaaagtttttaatttagtygatatgaygygyggygtagttaatgggaggyggagttggygttttttggtygggggggggtyggaggggtgggtttygygttttyggtgtttgtygtgtttattgaatggagagagygagygtyggttagtttattyggtygtttygtgttttagtygtagtygtygygttttttagtttagttttaagtyggattttttygggygttaygttttattgygttygttttaggtttttaattyggttygygggttagyggggttagggggygtttygtatttgggtatttttagygatgygtagyggggtagygtyggtttygtygatggagttgttgttgttgtygtygtygtygttyggagygtttygtttygttygygtttygtgygtttgagtatygagttygtttttttttygygttaatttygtygttygttttttaggtygttygygtttttygygygttttttygggttttaygygttttgtttygtagaggtagttttttttaggagyggggttttgtatattatggttttygggtgggtaggggtyggygtygtygtgygygttygtttggygttggttttggygttggygagygttttgagtgggtttttagtygtygtttgttttattaagtgtatttgtttygttgttagygtggattgttaygggttgggttttygygyggtttttyggggtatttttygtaaygttgagygtttgtgagtatttttgttttattttaygygggttatttatttgggttttatygagggggttttaggygttagattygtttttttttttygg

SEQ ID NO: 11310 - DNA, 909 bp, synthetic construct
  misc_feature 1..909: note = Description of Artificial Sequence: Synthetic polynucleotide
  source 1..909: mol_type = other DNA
ygggaygggggygagattttgggtttttaggggtattgaggggtygtttatgtygggggatatggttatttgggggyggttttygttaatygyggagtggggaaaaggggggagggatggaggaygaaygttyggyggtgtttaaaggtaygaygyggagtaggaattatagttttggtttttagaaagygygygyggttyggggtagaatttgtygaagttttagttyggggygtaagggatgtgggggttattggaagayggggygygggtygttygtggggaggagattggattygaattyggtttattttattygagyggygaygttagygttgattttaggygtgtttyggttttyggygyggtttyggtttaatygtgtaygttygyggaaggtttygtattygygttagaagtggtttgttyggggttatyggttygtaagttttyggtgttttygaggtttttgtttygtttygygyggttgtagtyggygggaggggttgagaggygggtygygttgggatttaaggygtygttttttygttagttttttttttttttygttatygggtggtyggagattygggggtattgttggggtattttaaagtatagggttagtttgagtgygtaaggttttgaaaagaygggggggyggygataaggagtagggaggggggttggaggaagayggtaaagtgatttyggaagggtttaggygttttaagtttatygaagaygggaggtttttagtggygtttggggggattgtgggaaaagtagtttaagaaggggaatttggagygaggtgggggagaggtyggtatggttttttttaggagygttagygttagatagagyggtgataggtygtatygggagtatttygtttatattgaaygg

SEQ ID NO: 11311 - DNA, 2150 bp, synthetic construct
  misc_feature 1..2150: note = Description of Artificial Sequence: Synthetic polynucleotide
  source 1..2150: mol_type = other DNA
ygtttttygtggtygggaaggttaggtygagyggggyggttagtygggtygggaggagggggtttttygggtygygyggtygtataaagyggggagatttgttgttgyggyggtatgaggygygttttttttygygagttagyggagygygygygttygttttygtttttygtttttygttttagttttyggagygttattygyggagyggtttaygttagtygtygggygtatygygttttagyggtyggggaggtgygttgttyggttttygtaaagttattgtgaatggggagygggtgaygttagygtygaatgttaataatgtagygattgagagtgtgggygtttyggggagagygtaagtygygyggygyggagtaaatagygtygagtygtygtygttttagtagtagtagtagtagtagtagyggtagtagyggtygtgtaygttygggttgyggtygtatagygttaaygtgagyggtygtygttttygttatttygtttgtttattttygtygtygtttygttttygtttttttttyggttttttttygtttttttttttttttttttttggygtattyggggggttgggaaygagttgttatgtgatgygygtttttttygygagttttyggtgatttaygaattgtttatttygtyggttgtygggagggggttgygagtygggaagaygyggggaagaggaggyggaaaaggaygtaaagtttttyggygaggtgagtttygggtttygggtttygggtttygtygttgggyggggtggyggggtaagtttgyggggggagygggygygyggggygggyggggaggygtggggaaayggygygggaagggagtttyggtygtygggygygtagtygtttttttygygttttgttygtttttatggtattttttaggaaygggaagggggtgggagtygagtyggyggtygygtygygtygaatgtgtgttttttttttyggttgtttayggyggtygaggygtattgtattttgttggygtygaagggtgttttggaatagtagagggaggaggagtagagagtaataagttaggtatggggagggygggttgtaggaggygygygttygygygagtygtagtagttgttagattygyggttttgttttyggttyggygaggttygggtgtttyggtttttagtttgygattttagttttaggtygggyggttttttttttaattttyggygtgygtatttygggttgtttygygaggattttggtygyggygtttttgygtttagttgttagtygtygtygggtggttyggattatygygatyggyggggaattaaagtttaagtttagggtygtaggaagaggygagttgggggtttygyggygtagatttggatygaattttttttagygaaagatygggttgtyggaaagygtttygygtagttaagatttaagggygttaggtttttgagagggaaattttgtatttttttttttatagattttttatgaagttaaggtgtaatatatatatatatatatatatatatatattttatattttagtttttaagttttagaagttttatttaggagattggtttatgaaggggatattgtttttttygttttygygtygaggygtttygtggtttygttgtgtttygtttattyggygggtgttygggagttyggygtygttggagayggyggygggyggygtttaygggttattttaggtgtttaygaggggagagattggagygagtatttyggygatttyggtttggttaagtatttgtaggaattyggatygtgaggggaagygtgtagggtygggagtgagtgtgtgaaggggtggtatatttttggtttttggggtygygggygtatggggtatttttagtattttttygygygtaggygagtttggtaatttgagggaagtttyggygyggtygttgtyggggtggtttgtttgtggttygatgaggygygtttygtagtttgttttttyggttatygtygtygtygtgatttgtggtttttaggaaaygagagggatyggggygttttattygygagayggattygtagtttttyggygggttygygggyggygagaygyggygt

SEQ ID NO: 11312 - DNA, 506 bp, synthetic construct
  misc_feature 1..506: note = Description of Artificial Sequence: Synthetic polynucleotide
  source 1..506: mol_type = other DNA
ygttttaygaygtttatgttagggttttttagattagyggagaaattagtagttttggatygtaagyggyggggttagggaggygataaygggaagtttttgtyggattttggatatttaggatttagtgttgttygggygttttttygtagtagttttagggygaggaggatggggggggttttygtaggggttatattgtyggagttttayggattygggygggayggtgaggtttttatattgagtyggtggtaaagttttygygaggatgaaggaggaatttygtgttttttattttattaggtttygtattttttggttttttttgttttaggaatygtttgttttttgtygygatyggygagttttttygggtttttttgaaatagtttygtttygaggttttggatttggaagtttaggggtatygttygggagyggggtatttattgtgggttttygttagttagtatttaggttyggagttyggggatagygggygt

SEQ ID NO: 11313 - DNA, 1503 bp, synthetic construct
  misc_feature 1..1503: note = Description of Artificial Sequence: Synthetic polynucleotide
  source 1..1503: mol_type = other DNA
ygygtttttgggtatttagaaataggtttttttygggaattygttttygatygggygtttttataatatttgaagttttttaggaygttttttgagttgggtaaggygagaggatttttttttagagtttagtttygagtaatgttygagttygygaggtggggttgggggygataaggaggyggagyggggatttagttatyggggatttttttttaagttagtttttaaattattyggygttatgtatttatagttygygygtagttygtgygttttggattttatttaagtattaggttygattagggtyggttygaaggttatygtttayggttagggtagaggggyggygggaaaagggtttagtggattttyggtttaggagggtyggttagttgttgggtygygggtatttaaagttgygggggttygggttttygattttaygtttagyggggttttagtattygagggygygygttgygattygtagagtagygggtgtagtaggttggyggggttgggatygygagttttgtttgtaaagtttaggyggggtagaygttagggagggggtygygtttaygygggtagtttyggygttgataggtagygaygtattttttygtaattygtttattagtagtttaaagtgtgtattgggtttttagtgaaatgtttggttttgaaagtttagttaatatygggtttagyggagttattagggtygttttttgtttygtagaattaggttttggtttyggttayggtgggggtttygtattagttygataatttygaggttaygygttygaaggattttttgggataagaagtggagtggggyggttaggaygygggtygtggggatygygagggaggagggggyggtygttyggatttatttygtggggttttygygygygggygtttyggygtgtyggattatgtygtyggtagtttygggayggggaayggaggygtttaggygtygggtygygyggaaygyggagtttygggygttygtatgtttttggttttggttttttggaagggttaggtygtygttgtygtygygttttggggttttygtttttttttattttttgtatyggagygagyggggtttttaggaagaggttggttttggtggttaagggtttttttgttaaaagttattyggtagyggttygyggttyggagttttttggggtatayggaggttygggyggtygygttttyggggtygggtttyggggyggggggtgttggggttaaggygtygtaygggygtttaatttyggggtgtygtttttataggttgtggttggggttggggygygggaggttygyggggtttyggagagggaaatttagagaaaagttttttatttggtttggggtygtaggggaaggaagaygtttttygtttgtgtyggygtygatygygggtyggtaggtggggaggtttagagttggyggggagttygttttattygg

SEQ ID NO: 11314 - DNA, 907 bp, synthetic construct
  misc_feature 1..907: note = Description of Artificial Sequence: Synthetic polynucleotide
  source 1..907: mol_type = other DNA
yggtttaygtgttttttattttggttygtagaggtttgagtgttgtttygggtagtttygggtagggttgggtagggtttagyggattttaygggtygttttttttygtttttttttagttatttgtttgtygttttttttygtttttttttttttgaggtgttgtttyggttttyggggygggggtagtygygggtagtttagttygtagygtttttagaggtgttygagttttttgaaygtttygtaggaaagtagttgtgttgygtggagtttttttttygtttyggttttttygttygtgtttttgtttttttygttttgyggygggaggtggyggtgtgggttttyggggaggygyggygggttggggaggtggggaagggtgtgygygtgttgggggtgggggggaaagatttgtygtttttttttttygtttttttagtttttggttgttatgtagtttttatggtagyggtatttttagatttaatttttattttygtttagagttaattaaggtaaaatagtgaggggaggagggaagagygtggttagggaagggaggggggagaggtaggaaatttaattygaagttgtaagtgtagygtttattttgttaaagtygtagtatagatttygaagtygtagygtygttttttttttttttygttttagttygagygggaagyggtagtagttttttagagttttggtttggtagggaggggayggygttygagtagttatattgtagtttttygggtttttttttyggtyggygtaggtttygygtttaygattttttttgggagtyggatttgttttttttatygtygttattygtyggtttttgygttttttggttttygatatttygtttggtygtttttttgtgtyggttyga

SEQ ID NO: 11315 - DNA, 1925 bp, synthetic construct
  misc_feature 1..1925: note = Description of Artificial Sequence: Synthetic polynucleotide
  source 1..1925: mol_type = other DNA
ygggtttttygtygttttggggttgagtttggtgtygttgtttatattgaataggaygttttttttygtgagyggyggaatygttattyggtaaagygggtgttygaatagtttggttaggagggaggygttttygtyggggtyggggggygattyggatygaygygggtyggggtttygtagtagyggtyggtgygyggggtygtggggttttagggygtygggatttygttttygtaaggygygttyggtyggttyggtygygggyggtagtttttttagygagtgggaygagaggttggaggaggggtyggagttgaagttttgtaggatgyggagygtgtgtttgttgggttagttygygtygtyggyggyggaggaggyggtygggggtttttyggggyggtttygaatttgggtttagtygggygyggttatttyggyggygggttgygygtaygaatagtygggttttttygagggtygygygtygygtygttttagtttgggtagtaggtttagggygatgtgtagygygtaggttattaggaatattattaggatgagtaygyggaatyggygtattagtattatttttatggtygygygggtyggttygggtttggagygygttttgttygygygtttttttagttgtagttgggtaygagygyggygtygtttygygggttaaggtttatyggtgtygggyggttattagtttyggggttgttttygggttygggtygygtgtagggygttygtygtyggagygttgggttttygygttatttygggttygttttygttyggttttttyggagyggtygygtttttagtyggggagtttaggggttttggttygyggagtygggygygyggggggyggttggggtygtagtagggggaggttyggygttygtagtygtyggygyggggtttatygggygtgtgggtttatttyggtyggggygygaygggtttgggyggtggyggyggtygtaggygtttygatttttagygygtttttttttaggygtygggygggygggyggggaaggggyggttttttygggtygggttttgtttttaygtygygttygggagatyggggttggggggaaggggggggygaagggyggaaggggtgggygyggggagyggtyggyggggtttygggtaggtgtagyggtygtttygagygtagttttygtttggtygagtttttyggygtttygygtttygggygggtagatatygagygtygyggagtygtttttygygttagygtttatagattggyggagtygtygttttaygagttayggttgggttygggtyggttgygttttygtttttttttttttttttttyggtygygtttygygaygtttttgagtttygggttygttaaggagagggttttttttgttygyggtttgtagagggaagyggyggagatygggagggygygttyggttttggttaggttagtagttgyggtygagtggggggtttyggtttggtygttttttgggattttttttygttyggggtygtygtygttagttgtagtttttyggtttttttttagaggagygyggggtyggggtttaggttaagttttttttyggagtygyggggygtttgygtygtyggatgagtttttygtygggyggygatttygtgttttaygttygtttyggtaaggaggaggyggaggyggtttygygagagaggtttaaggagygattgggtttggatttaggggaygttagggtagyggagttttyggtatyggtttygttttttttttttygtttattygygggaygygttygttttaattttttaggygtygggttygttgggggygttgagaggggttggtgtgtygggggygtttttttgtttggggtygaygg

SEQ ID NO: 11316 - DNA, 1287 bp, synthetic construct
  misc_feature 1..1287: note = Description of Artificial Sequence: Synthetic polynucleotide
  source 1..1287: mol_type = other DNA
ygygtggttygggaggttttyggaggagggaagggtttattttagygaggggtataggyggagaaggtgyggggygaggyggtygygggtttttggtatttttttttttaygtttaggttaagttggyggtgttgttggtgaygttggtggtggtygyggttttttatttgyggatggagtagaagttgyggyggggygtggtttygygttagtttygtatttygyggttttagtataaggtgygyggtgayggttatttggaggaggataattyggaygagagygaygyggagggygagtatggggayggygyggaggaggaggygtygttttyggggtttaggtttggtttygagttygttggattyggtygtyggttttgttygtaygaataggygtaggggggygaygggtyggaggagtagtgaggggtygtttggttttyggatttagtttygtttttygtyggttttagtttattaygttttaggtyggggggatttttttygagtttygygttgttttygaaggtttttgtttttttttttttaygttggggaygttttttttagagttygggttattttygggttttygtagttttttttaaggyggagtggagttttgggaatttttyggttaagtataggggttygaaaatatagttgatatttygygggtttttagtaygygttttagygtyggagtagggttagggtttttttgygattyggtttygttttagatttttttagttttyggtygyggattygggtygygtgtgagygttttttgtattttttatttttagggttygtygagagttaygattttttatagaaaatgagygataaagagattttgtattgttttgattggagagttttaggtygygggggayggagygtttttgggatgtaygttyggttggttyggtttttgggygyggtggtgagaggttttgatttagggggatygyggggtgtggggagtgyggagttttattgggggyggggygaggtgttygtaggtttygtttattagtttttttttttttttgaggtttygtttttttatgtttgtttgtttttgttagttttagttaggagaagggagygggggagyggttggtagagatagaggagggtgtgayggygttgttggttttttatgggtttagagggygagatagatttygaaggtatattttttaggggtttgtgtaggtattttyggttttttagygattattttygygtyggatagggtttattttygagttaygg

SEQ ID NO: 11317 - DNA, 2906 bp, synthetic construct; identical to SEQ ID NO: 6859
  misc_feature 1..2906: note = Description of Artificial Sequence: Synthetic polynucleotide
  source 1..2906: mol_type = other DNA

SEQ ID NO: 11318 - DNA, 2146 bp, synthetic construct
  misc_feature 1..2146: note = Description of Artificial Sequence: Synthetic polynucleotide
  source 1..2146: mol_type = other DNA
ygaaagyggttttgagagygttttyggggttttttygaagtgtttaaattattagygtggttagyggtttygattttttattaygttttttttygygggtttaaagggatttgggtttygtaaatttttgtygagggagaygttygtygatttygtyggtttayggggygttttgtttttttyggggyggttttttaggtaggttgagagygaaygggatgagtatatttyggaygtttaagggggygtttagygtttygaagtygtygttttggtttgygtygtygtyggtttygttttttygggtaggttggaagygttaggtgttygygyggtttaygtagtagatggygtygtttagggyggygtagyggaagggttgtaggttygtggggtygtyggggaggygtaggggygygaygtaygggttttattgtttggttaggtagtggtatygggataygttgatttygttyggtttygtygtttgygtttygtygyggttgtygtttagatygaagyggtagatgaagtygtygagagttattatgtyggtygagygttygyggttgttgttgtaygggtatttttgttattygtygygtygygggttatatttgagtaggygatagaagagggagttttyggataygtagatttygtygtggtaggtggtggttttatgygttayggygaaggygtttyggggtagyggygttaygggggtttagyggtyggygygygggtygtagygttttaygttgagtaggtattygtygtttayggygtagaggtgatygtttagggttagtagtygtagttgygagygygtttggygtaggggttttayggygttttagttgttygtggtygggttgtagtagaagatttggtyggaygggygygygyggtygtyggggttygygggygttaygtygttygttaygaagaggtagttgtagaggaygtataggtygtagtttygygtyggygygttttygggtagtygygttagttygygttatttttyggtygtygygtggaagtagtagayggtygygttttygygygygttygygtttttygaggggttttgaggtyggttgttygygygttttttygtyggttygagygtygyggttaagaggtgggygyggtyggygygtaggyggyggygtagtagtaggtttygttttgygttygataggyggtygaatayggygggttygygtagtatttttagatagtggtygtttatgaagtagtaggyggygtygygtagttygtttagtygttgtygtttggtygygtttaggatttygtagtagttggttaggtttagttgyggttttayggygtyggtggygygttgygyggygtygggtagttgtaggyggygygygtyggttattatttyggttaygttgtygggtygtaygttygttatgygttygttgtaggygtyggygaggagtagtygtagygtygttaggtttattttttgtattygtagtaygtttygygaygygygygygyggaagtagtygttgygygtygttagtatygttttgtgygygygtagtyggygtttygatatttttagtattaggttyggtttttygtatatygtttygaatttygggggtaygggygygggtttttygggtttttygggggaygyggggtttttaagttaaaygygyggttygggggayggygtygygggttttttygggtaygygygttttttaggggaygygagttttttyggggaygyggygttygygttgtyggttttttattgtygttttattattygygggttatygttggagggyggggaggtggtygygtttttygtygttgaggygagggattgyggyggggattttttttyggagttgaagtatagggaygygtygagattgtagggtgtttgygtyggggaygyggygttttygttttygtttttttyggtagtttygggtttagtttttgggtagaggaygtagggggttatygygtgttttatggtygggttgtgttgygttgygttygygygttttyggtttygtagtttgtaggtttggttaaggtygagttttatttyggggtttttagttttatagttttttttggtaygyga

SEQ ID NO: 11319 - DNA, 865 bp, synthetic construct
  misc_feature 1..865: note = Description of Artificial Sequence: Synthetic polynucleotide
  source 1..865: mol_type = other DNA
ygggagtttttttttttygtgygtygttgttygggaygagaaattygtggggtatttaggattaggataygaggttttagtttgggtaggtggataagttgtggggttttatttttygtaggygatggttttttaaagtttgtataaatyggtttygtygggtyggttatgttygttttttttttyggygtgggaagtttttttaaaagtggaggggagygagtgtygygttttgttaatttygattgygtttgggtttttttygygtygggtttyggagtygttttttttgattttgygattayggtyggggattttgygygygttygggaatgtagagtttttagygtygygtagggttygtttygatttyggtyggttttgggtaattygtttygyggttagtttttattttaagatgtggttyggtttttattttygygggggggaaatgtygggygatttttatattgatttttttgygtatttagygtaaattaygaatttagagttggagttgttygtagatttygygtagttagatttygygtttttatttygtttygtttygtttygtttggygtattaattttyggtygaggaggggtygygtggygtygyggggggygggtygygtaygtttttygtagggaggatttagggatagttagggtttygggagagttygygygtatygttyggtttygyggygttagttatggygttygtgygtggtttygttagggatggggygaygyggttagagtygtaygygatygaaattygtattttggagtygtagagygygyggttttgttgtttagyggttttttggtaagtgaygtggggaagaaaygtagggygt

SEQ ID NO: 11320 - DNA, 865 bp, synthetic construct; identical to SEQ ID NO: 11319
  misc_feature 1..865: note = Description of Artificial Sequence: Synthetic polynucleotide
  source 1..865: mol_type = other DNA

SEQ ID NO: 11321 - DNA, 1463 bp, synthetic construct
  misc_feature 1..1463: note = Description of Artificial Sequence: Synthetic polynucleotide
  source 1..1463: mol_type = other DNA
ygtaatttggggttygtagaygygygtggatataaaaatataygttttygagatttatttttttygggttatattgtggggttgygttyggggtaygggttatgtttgaatttttttttatygtygygtttygggttygygtttygtyggtygttygtattgggtttygygtygttttygttattatatygagtygtttagtattttttttttttgaaggttggtttygttyggggtgttttttttttyggttttgtygtygttgtttattttttyggttttttttygtygggtygggtagggttggggygyggggttgggygagggygygttagtttattggagtttttttygggygtyggggttttttygggygggygtygygggttgtggggttggagttggagtyggggtagtggttgtygggttygggttgggttggggttttygyggygagtttgygayggyggyggygggygatttaggaagtgtaagggagagayggggtagggygygggtygggagyggggtatygagataatygggtttygggagggygatttggagagggagggygggagttaggggaggaaggaagaaggaaggaaggaaggaagtaaaggatggggygaggaygygygttttaggagtaagygyggagagttggggttgggggttgtagtygttggaaggaggggaygggggtgtttagagaggaggaggaggaggaagaggaggaggaggagyggggyggaggagygygggtygyggttgggaygttgggattygagagtygttgagtaygygttttaggtaggttttgggaagttygggatggaagtagttttttttttttygtttttttttttttttttttttttttttttttttygygtttttttttttttttttgttttttttggaygtgggttgtyggttgtagttyggagggayggggygygggayggagtttttygygggaggaggggtyggyggtyggatggygygygtyggggaggggtagygggtygygggyggaagyggygattttagttttygatttagyggttggtyggagggygagggttygggaggtygagggtagggaggtygggtttygtygtttttttggttttygggggtttyggygtttgygygtttygggatttyggggattttgtttygtyggggtttggatygggatttgggatgtgtgygatttttagtttgtyggtttttatygagggatttgtatttttggttttaagtttatttttttygagttagattyggttttttttttgttgtttgaatgatagtatgagaattygagggatatyggggatagtttatttygggtyggtttttttaggatagggttttaaatttatttttagygygggttttgygaygygttyggagtttttttygtttygttttttgagygtttygyggtttttyga

SEQ ID NO: 11322 - DNA, 1437 bp, synthetic construct
  misc_feature 1..1437: note = Description of Artificial Sequence: Synthetic polynucleotide
  source 1..1437: mol_type = other DNA
yggtttttyggagttgaggtttgygygattggatttaggggtagaatgagtgygtygggaattttaaaattttagattaagatataaggggagtygayggttyggaaatttygttgygggtgttttaagygygaggtygttygggtagggtygtttagggatyggggygttgggtgyggggtayggggttttatttttygygggttggggygygtagygygyggtttttttaagaaagttygtygggygagtttattaaagtttaaaaattygtygtggagaagggygygggggaagaggagagagggagagygttgatttaggygagagagaggggaaaggttyggtyggaggtyggygtttygyggtyggggtyggggygagtttayggtgggyggtggggattggttgygygttttttyggagatygygyggygggygggggagggggttggtygggttttagttgaggtyggtttyggtttygtttttygtygtyggygttygttttttttttyggygttygtttttygtygtygttgtygtygtygtygtygtygtggygtattygtyggtygtagtgaaaaggyggaggyggyggttttttyggtttttattgtttttttygtygtattttttttttatttttygtattygttaaatttgatgtgattttggttygaygyggaggttgttttttttattgtttygtgggtttttygttattygtttygtattygygagygtatygtttttygygtttttttttatttttygyggggtyggygtygygttygttttygygttttttttygtygttttttttttygtattatgagtaatttgaagtyggayggygagtayggyggtagtatyggtatyggtttyggygygggtttyggyggygttttggaggaggaggtgggtttgtggtttygggatttgtygggtgaagygtaygttaggygggygygggagagggygagyggggtttgtygygtttygyggggtyggggtggttatygttttyggygttttttygtygttgttttttygttygggtaggagyggttygtgttygygggygggagygtgyggtttggattgtttygtyggataggtattgttttttygttttttygggttygaggygggtygygygygtyggtygtygttygggygtttygyggtgggygagatgygtygygttygttttatgtttgtygttygygygttttttgttttttatttygtagtygttygtygttttttttygaggygtattttttgygtggttaggatttygtttyggyggtayggagyggagygggattagtayggttygagggyggtatttttattttattgtttttttygttttgatttttttttygtgattttggaggtttgggtyggtyggtttttyggtttttgyga

SEQ ID NO: 11323 - DNA, 717 bp, synthetic construct
  misc_feature 1..717: note = Description of Artificial Sequence: Synthetic polynucleotide
  source 1..717: mol_type = other DNA
ygaggagaaaggtygttaaayggagygagagtttttatttttatttattttagtgttatggtggtatatgtygattattatttgygaggttttttygtagatttgttttttyggtttygtagygyggaygattygtagygttttayggttatggttttttttataggggtgagtttgtttttyggatgggtggtgaagggtgattttggatttgatttttgaatygtagyggtttgtayggggatygygggygtgttgattttatgtgtttygtttagttgttgtagagtyggtttatygtayggtttttgygggaggaggttattttggagygattttttatttggtagggagatttygaatttattgtgygttggttgggtttgttgggtttgggttatttygygttgaatygtaggaaggtgtgagagaaggggaggggtggagaggggtttggttyggtygyggygaggtttgtaagaggttgatttygagttttagtaggtgyggtaygtgagtaygttgttgtyggygtttttgggygtattgggygaaggygaygygyggttygtgggtgtagygttgggygttttgaggaggtttttgttgyggtttygggygtttgtgyggtttttgagygyggagttgggatygygttttttttygttattggaygaygtgagtaaaygtttygttttygggtttygtttttgtygt

SEQ ID NO: 11324 - DNA, 1713 bp, synthetic construct
  misc_feature 1..1713: note = Description of Artificial Sequence: Synthetic polynucleotide
  source 1..1713: mol_type = other DNA
yggtagygaattaagttgygtaggygttttgtttttttttttattaatatgttygattggtttaygattgattatattattggttygygtaattttagtaggtttttgggtttgtagttgagtygaagtttttttttttgygtagyggggyggggtaygatggtggyggggggggaggggggaattgttttattaygtatgygtatyggggatggygatagggtttttttttttgtttttttttatagttttttttagtyggggggttgagtgtttttttttttttttttttgttttttttttttttttttttttatygtttagyggggtttttaattgatagttgtygtygggtttygttygtgtatygtttttttttgttygtgtttttygtaggtagaggggggygggagggggtgtgagggagaggaggagtyggagtygtygttgyggtttttttyggggaggggagaggagaatttttttttttttygtttttttttagtttttygttggttygggagggggtggggygtygaggtygyggygattyggtagggtttggtyggtgaagagtaggygggyggggtgyggaggggtgaggtyggygagggtygtgygygygtygtygtygggggggaggggagaggagggtatttaggttttttttttttttttttttttttygygygttatgtaatttygtttygtyggyggtgagtttaagattttygygygtatygagtygagtyggyggttgaggagagttaggttygatgtggygggggttaygygtygyggtygagtygtgaggaagyggttygygtttaygygttttttagtatttygagyggttgttttatatygtttagtttaggtttgtyggggtatgagtgtgttygggaygtygggagygatggagtyggttggggaggaagagyggtygttatyggyggtygaaggagaggaygaygaggaggaggtggtagyggyggtttagattttagggtyggtttayggaaggagtgttttttygttggaggaygyggaygattaggaggaagagatggaggygatggtgatyggaggyggttgttgtaaggagtaggagttgatttaygagttatagtagggttatygtattttgggygagtttttgtaggagaagtatyggggttttatygttttttttttgtagtttttggggggygttgttatygyggaggaggaggtggyggaagggtygygtagygggggtyggggyggtygygttttttygtagtagttyggatagggtatgtgtttgttgtagatggaagagaagttygttagyggttagtaygggggtattatygagttygtggyggattttaggttgatgttggagaygtgttatygtttgtayggagtggattattggatttttaaatagggttagaagttggagatgatgttggagtagaagttagygtttttttttyggtaagygagttyggttttyggtgggattgatagattgatataaatatatatttataygtgttygaggatgggttgggttaggggtttgggggyggygttgataggtgttgagtyggtgttggagaagttygggaggaggagyggygttgggyggggatyggaggggtgtggtgggtgtgggtygaattyggtttgygygtagattgagaaggaaattygagtttgtagygt

SEQ ID NO: 11325 - DNA, 699 bp, synthetic construct
  misc_feature 1..699: note = Description of Artificial Sequence: Synthetic polynucleotide
  source 1..699: mol_type = other DNA
ygygygaatygttttattttggatttttggaatygtgtttaggtattygggyggyggggttygtttaggtygygttaggtagttttgggtyggtgggtgtygggtttttttttttttygttttatttggygygttygtagygtygtygtygtygtygtttttttttttagygggygttyggagtatttygygtygygtttttttygtttyggttttygttygtyggagyggggtttaygtygttggtagttattaagtggttygttaaggaaatgtaggtgagtgygtgaggtygagyggtagttgttggagaygtggggtgtgtgtttgtgagtgygagygagaygaggagggagygttagygagygagygagygagtgygggagyggtygtttyggtttttygtttagtygygttygtagtyggyggtyggagygygtgggggtagygtttygtttygatagagtttygttttttttttgtygtttyggttgttttttygaggagtygggagtygtttatyggtttttttaattttgygttttttttttagttygagttttttygttgtttttttttttttttttttygagtttttttttttttggygyggygtygttagttagtttyggyggggagagtgtaggtattttgtttttagaataattagtaggatttaagtyggtttttygagygygt

SEQ ID NO: 11326 - DNA, 1191 bp, synthetic construct
  misc_feature 1..1191: note = Description of Artificial Sequence: Synthetic polynucleotide
  source 1..1191: mol_type = other DNA
yggagygggygaggayggttagtttttgtagtgtttaggtttgtayggaagygttttggtataatttagttgaggatataygttttttttygygtagtyggagggttgaatagtaaagtatttttygggggaattgtgtgttagygtagtttggagagagtaggtttagggggtagttttattataggagataggataygttttagtttgggtaaattttyggttttttttggttttaagttagtagtygtygttygygatttttttttttttttygtygttatttyggtygttttgttagtttygaatttgttygygtttggtygygyggttttttagtttayggggttggyggygyggttgggatgggatygatgtggygtatgygtggtggygttattaggygygggagttgttgyggyggggayggtgttgyggayggtygagggttaggtygtttyggtygggtttgtggtgggggtagttttagyggyggyggyggyggygtgggttggygaggtygygyggayggygttygatagtagttggaggagyggtttgtygatttggyggygagttatttggaggttattygtgygygggaygagtgggatyggtagaaygygyggttgygttaggagaaygttyggttgyggttygagaatyggyggttgaagygygagaatygtagtttttttygttaggttttgyggtttttyggygaaggyggtaaygggaygttygyggaggtaygtygggtttttgaagaggttagtaygaatyggagggttagagatagyggtygagaggaygagtygggtagttttagggttttgagggttygatttgagaagttggaagttatgtatygtygggttttgttgtagttgtatttygagtagyggggattaygttygagyggggataaggaggagtagtttttataggaattygatttyggttttygttttygggattyggagttttttgggttttggttgtagtygaggtygtagtyggtgagaggyggagtttygagygggttttttttttttygtttttagttattttygatttygygtaygttttggttygttttttgttygyggatattttggattayggtgttttttygtttttattagtggatattttygggtggygtttggttattygtttggtggaggtyga

SEQ ID NO: 11327 - DNA, 536 bp, synthetic construct
  misc_feature 1..536: note = Description of Artificial Sequence: Synthetic polynucleotide
  source 1..536: mol_type = other DNA
yggaygggatgtaaagtttgggtgagayggttatyggaygtttattggaagggtgyggggatttttaygtygatatttygttttttygttttagttygygtatttatygygtaygtagagtagtgatatggtygaggatygggtaagtttttgtygygttttagtygygtyggatygttttttttttttttttagtaggtgtygygattgttttygttatyggttttaygggtttggtagttttttatggtttyggtygtaggtagygtttygtygttgtttyggattygttttaaattttatygtttgagygaatttygggtagyggtgagtatyggtyggtaggttggggattgggygyggtatagygaygttatygttgggaggtaggagttgtygggattttttttygttattttattygggattygygygagygtttgggyggagttaattygtggtgtttygttttttagttaattaatttaygtttagtttatygatttygttttttttygygagtaygtaggaggygg

SEQ ID NO: 11328 - DNA, 728 bp, synthetic construct
  misc_feature 1..728: note = Description of Artificial Sequence: Synthetic polynucleotide
  source 1..728: mol_type = other DNA
yggttaatayggttaggtttttygggygttttaaggtttygttaattttggtaaaggyggtgttgaggtgaattaygtggatttgaaaaggataygagggtaggagagggttaygtttttggtttygtttygtttygtttttttgttttttttyggttagtttygygtttatttyggtagggaaayggtggttttttatagtgtgtttygagttyggaygatttgtagttttttagtgtagatgtagttgtagagttyggtattttygttygggatttagagttatttttagtttaggaggtagggttagttgtattgygtagggagaggtaagtgagtyggtttygttyggtagggttagtttaattttygggtaggtattgtygygayggtttttttttttgygtttygttttatttttaagtttyggyggggagatttttttattattgtggttattgttgygtaggygtagttttgggagyggygggagttggaagtttaggagttttagggggygtagggtygggtagaaggyggygagttgggggyggatatttatyggggattggaagyggttygygtaggttggggatattyggggttagggygggtygtttggggtgggagagtatagtgaggaagtttgaygtttaggttaggaatttagggaattygggtagaaaaggtgagggggtgggayggtgggyggygggtgggaygttygg

SEQ ID NO: 11329 - DNA, 1431 bp, synthetic construct
  misc_feature 1..1431: note = Description of Artificial Sequence: Synthetic polynucleotide
  source 1..1431: mol_type = other DNA
ygagttaygttgtttttttgggagtttatygtygaaattaaagttatttttygtygggagtaggtaaaaggatgaggggaaagaaaattaaygaattatttttaggaattgaygtttttgttaatgattyggaagaaataaaygtagttttttygtttyggttttgggttagtttaygtgatttttttgggaggttaaagagtatygttttgttttttttgttgttaagttaagttattttaygyggygtagtttygattttttyggtttygygtagttttttttttaaattyggagaataagttttatttttttygaaatgagaatttttttattggttygaatgtgtagtttattaaattaaaggggyggggaatttttgtttttattggtttttttttttygtaattttygttttttgttgagygagtttagtttttttttgagtttagagygttttttattttgtygggyggtttttgattggtggaagtgaggtaaggttgggtttygttttttttttygttygttagtaggttggagtyggggttagttttggtatttttttttagttagtggttaatttttggtttagtggggattgtgttygtttttttygtttttttttagtttttttttygttatyggaaygagtttygygtttggtaggttgaggaggagtaaagaaagtaggattaaagagaaggaagatttggttaggtttgggtggygtttgtagtgttagaaagggaggyggtggyggyggyggttgygattayggtygygygggaygtgaggttygagagtaatygaygggtagyggyggtygttttagygtttygtatyggggtygttagttagtagaaygygagtttttgtggaggagtagggtyggygygaggygagattygggagygtgagyggggtttttggggygtygtygttttttttygtttyggygtygggggttgtagttttggttttygtttttttgtygggttagtttgtaggyggagagagtyggayggygttyggagygyggatttygttttgtggaggatagygygtyggttgyggttttttttygattttttttgttyggygtttyggttygggtygtttaggtgtaggtgygtgyggtttyggggtttggggaygtygtagttyggttyggggagggggygttaggtygggagtygtagygygggagggaygagttygggtyggyggggggaggggagygggaagygtttttgttgttggygatygggattttttttyggtataggggaaaggyggggaagttattttttatygggtttgtgtttttgagaggattttttgatggttgygtgaaggggagyggtaggatagtttttgyggttygtggagyggtyggagttagggggtgggggagggaggatygatyga

SEQ ID NO: 11330 - DNA, 588 bp, synthetic construct
  misc_feature 1..588: note = Description of Artificial Sequence: Synthetic polynucleotide
  source 1..588: mol_type = other DNA
ygatttattttgygagttygggtgggagttttaggtttgtaggggtygygtggygttatttttygatygygatttttaatggygagttygtgyggtttttagtgygtygtttttttttgygggtyggtggggtttgygagaattyggggttgggggygggtttggtagtggygggyggggatttygggtygggatygagaagygttttygaayggtagttatattggggttgtttagtggtttgagtttttttttgttttttttttatatttttttgttttggygyggggggttttygyggygtygaggtttygttgygtygtttattyggagggaggagggtttttgggaggygtygygtgggggygyggttygtggagttygggygttagggatyggtyggggtyggygtaygggtgygttttgggttygttygggtygtgggagttagggagttagggagttagggatttyggttttygtayggggtagataggggtagygygggygattyggagygtttgygttttygyggttttttttttaatagggtaaatttaggggtttgatttygygtttgttttgygg

SEQ ID NO: 11331 - DNA, 1203 bp, synthetic construct
  misc_feature 1..1203: note = Description of Artificial Sequence: Synthetic polynucleotide
  source 1..1203: mol_type = other DNA
ygtttttttgaagttygttttttagyggtttggagttyggggygtggtyggttygaatttgttttttaggtttagaayggagttygtagttygtaattygttgtggtygtagygggtygygtttttygttttygttttaggagyggtygaggatttgtttagttgygggygttaagttttggtygtattttttttttyggyggagggagtyggttggygttgyggtttttaaggygygyggaygtygyggagggtagttagtygygygggagygggtagygygygygagggygttgggygtygtygygaggyggggaagygyggggtygyggyggtgygggttttagggyggyggtygtygtygtygtagtagygtttygagyggggagggtygaggaggttygaygagttggggatggagagtatygggttttttattgttttagagygygtgtgyggttttgggygygtatagtgayggtgayggtatttttggttyggtagygtygaggtygtttygttagatagttagyggtyggyggtaggtygggttatgagyggtaggggtygggtygggtttygttgattttggtttygygyggtagtttttttagttttygtttyggtttttyggtatgagagttygttygggttyggggttgyggttgttttagattygtygtaygttggygygtttygggttygyggagtygyggtgttgatatttgygtygtattgygtygttygttygttygttgtgtgtttygggggygyggttatggaggtggtgggtgatttygagtatagtaagagggatttygtgggatayggggttttygtygtggtttttygggggyggtatygttaggtgagygtyggtyggggygaggtygggtttygggyggtaggtayggggttaggtggttttgaaatttggygtagtygygagtygagattttygattyggttagtygttygggtatgttattgtgygygtagttygtttygtygtttgttttggttttgtgagggttgttgtgaggtttaagtttttggtagygtttygtttatygatyggttgttgttgatttttttgtgtgttyggggtttatttygyggttygttygtaggagygtttgtatttaggttattttggatttaaaatagayggtattgtatygtgtagattygagggttgggygt

SEQ ID NO: 11332 - DNA, 5370 bp, synthetic construct; identical to SEQ ID NO: 6909
  misc_feature 1..5370: note = Description of Artificial Sequence: Synthetic polynucleotide
  source 1..5370: mol_type = other DNA

SEQ ID NO: 11333 - DNA, 1691 bp, synthetic construct
  misc_feature 1..1691: note = Description of Artificial Sequence: Synthetic polynucleotide
  source 1..1691: mol_type = other DNA
ygagaataaaygttagtttttatttttgtggaaygtttaaygtagttggttgggggaataygaggttttgtagggagygagtttyggtttyggtttgayggaatataggygaygtaygtgaagtttaggttttattttagygtaggygggtttttagygatttatagttgttatatattyggttagygtygattttygaaggygtattttttatattttatttygagtatyggttttatygttagggaaggtttttttggatagtaaggtyggggtttaggatttgygagatttattttattygtttygttagagtttaggagtagtaataggtttgygtttttttygggyggygttttgtagattttygaygggttaagggtgtttttagtttagtygtgygtttaggtyggggagatgggyggaggattggggttttygatttttttgatagtttttgygygttagaaattgagtagatayggggttygygttatttygttygtygtttgttttatttygygaggttgygtttttattygggttygggagggtyggttygygtttygggtatgaatggggtttttttttttaatagyggggaaatttygttatygttttttatttyggttttyggagttygyggtggygtaggtttgtttagtaagtttttgaatyggtagataaaggggtatyggaggaaaagtygagygtttttttaaatttatyggttatttttttttttttaaaataaaggagtttttygtygattttygttttttttygtaaggygygtyggtatttyggggagyggttatttyggggtattgtttaggtttttgggagygygtygtattttagttygagygtygyggggatagttggygatttgtatttataggagttttaggggygggtggagygttygggygtttygagtygtyggtyggattttggagggttagygygggattygttttttygtagaagtttgyggatttygygttyggttygtygagttttgygtatttatttygtygygagtagygtaatttgtggyggygtygygygttyggtygygtttygaatttttttttagtyggtagttttygagtttyggtygtgyggyggtygaagagggttyggygtttyggagtagtygygygtygttttygggtygttttygtttygtygtygtygagtttyggagagagygygggygttggaaagtttyggtggygaatggyggtttgagggygttgyggyggyggyggggygggggygttggyggtttttygtttttaagygyggagtgggggygttgaggygggtgyggyggyggyggyggyggtagygggagagggygggatagygggagggattggtayggatagtgatttttayggggagttgtygygagygygyggattttagttaggaggatygttaggggttygttttygtygtyggttttttttttayggtygtgggaggggattyggygtattattyggtttygtttttgygtttygggggagtygygtttygaattagttttttttttaygagggtagggatttyggttttgtttttttttygyggtttttagtggggattygygttttaatttagtttttgttttayggtygggggattagygtttttattaagttygtttygtttttttaygt

SEQ ID NO: 11334 - DNA, 1223 bp, synthetic construct
  misc_feature 1..1223: note = Description of Artificial Sequence: Synthetic polynucleotide
  source 1..1223: mol_type = other DNA
yggaatgttatttgtttygattgttttygggtggttataggygygggggaaggygtagggttaggggygttgagggtgaaayggtttyggygttygggyggyggyggtggtygtttgyggtagtttagttgaaaygtagyggaaattgtagttagttayggggttgygggaggtaaggtaggaaggtggygttgtygtygagygtttggagttygagygtttattatggyggtaagggtaatggtygttayggggagygagtaygttttttygygygtataygtygtygygtygggttttyggggttygttatyggygtygttgtygtygtygttygtttttttatttttttttaygggttgtagyggaattttttttttagatatygtttttaagatggyggttttttttttyggtaattttttttatygttttttgtagtaggygtygagtygtygttattttgtttttygttttttttttttttttatygatatttatatagygaaaatyggttyggtyggtttgyggtttttattttaygtttgtagttttygttttttygttaggttttatttyggygyggtgttttaggtyggtygyggagtygattyggggtttttygatygttttyggtataatygggygatttttttttaattttygttygtttayggagygygttttygtygtygttyggggtagtygggttttttttygggtttaattgyggttttttyggggtttgttyggygtygygygttaygtygttyggtttagygygggagggygttttgygggtygtygattaggtygagattaggtygttgtgygygtattaggtttygyggtygyggyggtattygggatttatyggayggaygtgygggyggtyggygayggtggygggtgttgtaggtyggtttttttttggagtattgggtygggtttyggttggtggggygggyggagggagggaggaggggtygagttyggagttgataaaaagyggtttagtttttyggtaygggttygtygttagtaygttaygttatygttygggagagagatttaggaaaatgyggaagggtagataggttttttttttygttyggtgggtttttttggtatttygtgtyggygtygttttygtttygygatyggggagtttagtggtttygttgyggyggggttttyggyggtyggagttttygtgatagygt

SEQ ID NO: 11335 - DNA, 1103 bp, synthetic construct
  misc_feature 1..1103: note = Description of Artificial Sequence: Synthetic polynucleotide
  source 1..1103: mol_type = other DNA
ygaggtaygtattaggggggatttygtattygtagtttttygtttygtatttygtagttygggayggtttttggttttyggttttagygaggtygtygaagtygtagtatttagttttggaaggttaggtagtygggatygtagggattagtttygagyggyggyggyggyggggtagaagggtagtygttttttygggatttaggaygtyggygggygggaggtatataygygygtataagyggaaagaaagygggtttattgygtggggatgttygttygygtagttgtttyggyggyggyggtygttgtttgtatygaggtygaggygyggyggtggyggyggyggttgyggattgagtttttttygtygggyggtggatgtagggygygggaggggygygaggggaggggtgygygtttgggaggyggggagggaaagaggggaggaagtaggagygygggggygggygyggttagttaggggyggggyggggygygygyggggtygggttttgtttattgtayggaggttgtgtgyggggygygygygygggagayggtyggaygggygtggggagaggggyggtttgttaygtatttygygygtttaygtgttttygttattggagagggtygggtaygyggagagggtggttgyggggaygyggtggtaggttttttttygaggatyggttyggattygaagatygggaggagggygggtygggggygtttygggttttttttttygygtagyggtttttagaggtttgygggagttaygaattattgtaggyggttggggttggggaggtgggagtaataaagatagttaagtgagggtggygtttygttttatyggggttttygttaatttgygtattttttgaaaagyggtttygtttyggggtttaygtygtttyggttttygatttyggaattyggtggtttgtagyggygtygaaaggtttatygaygatttttttttttagtagtaagtyggagggagttaaataagttttatttataattttagtgttattatttagagygttttaaygttatttagaaagtatygatggtaaagyggygygtggygt

SEQ ID NO: 11336 - DNA, 616 bp, synthetic construct
  misc_feature 1..616: note = Description of Artificial Sequence: Synthetic polynucleotide
  source 1..616: mol_type = other DNA
ygtatttaatggygattygatagttttatttggtatyggtgttyggttygtggggygggtggagggtygggtagtygtagggygygggttttttygggtggayggtgttyggtygggtygggtygggtyggggaggtaggygyggggygyggggygyggtgtatagyggggagygygtagggaggygaggaggygyggattgggtttygttygtaggagaataaataggtttttttyggtygttyggagtttygtttttygttttttttttyggtyggtttttttttttgttttttttggggtaggtagaggygtttggtatatttygtatattttttygttagygtttttygttygttygttttttttyggtttygtttygyggggttgttggagaaattaagtttggggttttttttgtygagtayggggygagttttagaaggttttgtygtgatggaaaatttttaggtaaattttttygggttygtggtttttaggtygggaagttttygttaygtgaagggttttygtttttagttgygygatttggtttyggtatagggttaaygatttttatagatgttgtygggttaatttagtygagaattatygt

SEQ ID NO: 11337 - DNA, 206 bp, synthetic construct
  misc_feature 1..206: note = Description of Artificial Sequence: Synthetic polynucleotide
  source 1..206: mol_type = other DNA
ygttaaaggygaygtgtyggtygttagttttaggtygagtttygagygtttgtaggaataygtttttttattyggygygggaygtagagttgygagagaattttgtttagygyggatttaaygttagggygtygtttagaggttggtttttgtttyggttttattygtygggagattatagagttgtttttttagtygttygtygt

SEQ ID NO: 11338 - DNA, 1141 bp, synthetic construct
  misc_feature 1..1141: note = Description of Artificial Sequence: Synthetic polynucleotide
  source 1..1141: mol_type = other DNA
ygtattaattggygtgtgtaggygttgttgtttygygttgygtayggagaagygtttygaatttatygtaygatgyggagttaggggtagygagtgagyggyggtttttagtttttttttgttttttttttgttttttttgggaatggtagggggttttttatgataaatgttygtaaataggatagggttyggaygattttagagtyggygttttttttttatatttttagttttagggtyggattygttttygyggttgttatygtttttgtttygggygtttygyggggattatttygttaggtgagygtttttaggagtttttttgaaatttatttgygtgaagtataagtttattagygtgagggtgaaaaattgtaggtatatagggaagtagtagagtagttagaagaygaaggggttgagygaattggtygttaygaagtttttgaagtagaaggagaagaggayggttygtagggaggtttagaagaggtagagaaagaggaagaygttttggtagttgagtygtttgtggyggtaaygtagtattagttagagttgtaygtagatgaataygaagagtagygygtagaatayggtgtagaygayggtgaggttaagttttaygtaggggggtayggtyggggttagygtgggyggtagygagtygttgygggttgggttttayggyggggtttttatygggtygggggygttgtygygyggtyggggaygttygggttttatyggggtttayggtygtygtygttttygygggggttttygygtatygygtttagtttgtagtttygagattggaggaaagaaaataagtygtattttttttttyggtattatatgatttattgggayggtttttgtttgygattggtagygtygygttygtygttttygygygtygatyggtttygygygttttygtttyggttygygygttttygtttyggttygygygtttyggttygttttttttygggtatygygygttttygtttygygaatttyggttygttttattttygttatygygygttttygtagtgygygtttttagagtygtaygttttttttyggttttttttttattttyggggtygygygtttttagattgygg

SEQ ID NO: 11339 - DNA, 1819 bp, synthetic construct
  misc_feature 1..1819: note = Description of Artificial Sequence: Synthetic polynucleotide
  source 1..1819: mol_type = other DNA
ygyggaygtaggaygtagagttttagtatyggtagttaagaggaygtaggaaagygtaygtatttataggtttagagaygyggaygttagatttaggtttggatagagtagtttygtaagttttaatatattttgtaaatttygaagataggagagagttaaaatattttttttgttygtaygtaggttttttttgttttttayggttygattttgggaggyggatgaggatatttttaggtttggatgggggttatgggatattttattttagattttgttaygatttgggttgtgttygttyggtgttttyggtttaygggttgtataatttggyggtttygaaattggygtgggggaggggagggttgtttattygagtaggaygyggttgtttatttagtyggaggtgaggaaygatttttttatttygttgtygggtttaagyggggttygagagtygtyggggagagttaaagggaggggatygatggattttttagagtgaaattgtgygttttggagagtttygaggtagtttygygagttttygaggaggtygttgtygtttggtaaatataaataataataaaaggaaggaaatttaggyggtagtgygtagaaygagtatagggttttgtgagggygygtagggtttaygygggtgtttttaatagggttttttaygtaggyggygygggtayggggtygggggygygyggygtttttagygggagggygtttggattaggggtttygtttttttttagygtattttygtttttttttagygtattttygtttygygttaggtttattygtagggttttttttagtaygttygyggtygtagtagttagtttagtatttattttygaagttygaaatgattttatttagttgygygttgatygyggggttygatatgatggttggtgggtagygggtygygyggagggtagyggygaggaagygttttyggyggggttygggttttgygygttggttggggygtygygttygygtttttgtagtgtagagttagtygtyggaggagtttttaggttttttggtttagttgaatgaatgggggaggaaggygggygtyggttttttttygygygttgygttttygtttygttttygtttttygggyggattaggttttygtattygtatyggtttttttgtttygtattggttgtttygttygtttgttaaggttaggtttggggggttggggttygagtggtygttgggggatagttttgggtataygatyggagygtttttttttttttygtttggttygygtttaggggayggygagagaygyggttttagttttttttttygggygtttygttgyggttagatgtgggyggatgtggaggtygggttatggygaggagggygggygtttagaggggaagagattttttttttttttygggygtagggtttttttgtaggaggttgtatttgggtagttaaataaagttttttgttatygtygtygygygttttgygtttgtaagggttaaayggtagygtaygyggttggtaggtaggatttyggtttgtgggtttaagagtygaggggygtagggygaatatgygagttttatggtattagygagaggttattaatttttatttatygagggtatttttgtagttaatatttttattaygattatygtttygggggttatygttgtatttttttgggtgagttttggagaaggtattgttygggagaaggggtatagggyggggatggaatayggttgttagagaagttagggaygggygaygt

SEQ ID NO: 11340 - DNA, 1813 bp, synthetic construct
  misc_feature 1..1813: note = Description of Artificial Sequence: Synthetic polynucleotide
  source 1..1813: mol_type = other DNA
ygagtttattttattaaygttaaattygttagtttygttagtyggttgtaggatygagggagggtgtaaaaggyggggggyggagggggggtagattagattaggygaaatttaataagtttttagttttttagtttaaagtttttattatygtygttattaaygagttattttaattgagttagtatygtygtttattygtyggttygtyggaatygygtttattttttgtaatttygttyggatyggtatttygttttttyggttyggttttttttttttygtygggtgtaaagttaaagatttagtaaggygaygtgaatttttgtatgtagggtatataygtygttttyggtttygggagtgygggggttygyggygyggagggaggttgggygttygggttttygggttaaggtygtygygygtgtttatttatgtttyggyggtttyggtttygttggtttyggygttygtttagatttyggttttygtygttygttygagtttttaaaggtgttgttgyggtaattttatggygatgagtatttgttaaayggygagtygygagttggtygttttagttyggggggygtyggggttttygggygygyggaggyggyggygagyggygggygtttyggtyggtttygygtttttygttygattttgtygttttygtygygttatygatttatggagagagatattaagggggaaaatggygttttyggagttygaggagttttggagtaattatatttatatatataygttygtaygtatatatattygtatatattggtatataggygygyggygagttttgttaattttagtaggagttaaaaaaaattttatatatatatatatatatatatatatatatatattttygttttttygattaatgttttttttttttttgtttttttttttttttttttttttttttttgtttttttttaaaggatgggttggagygttaaaaaatgttggtgggtttgggttygtaggaggyggygygyggagggygagggygtttttgttgagttgtgtagttyggttygttgagttyggyggttttgttygttygttygttygttygyggtygttagtgttgtygtygtygtygtygtygtygtygttgttgttttatggtygygttygtttygygttttygtygygtttygtygtygttygttygygttttyggtgagygttggagtggggtygggttygtgtgtttgtttttygygtttttttygaatttyggatttttagtgaaaggaagggggagggygygggygyggaagggaggtggatyggagyggtagygyggtttagtygaaygggtatygatygttatttygygatttttttygtagggggygtyggygtttaagttgttygttyggagggtttagagtygttttttagattagagtygggggaggygtagttagtagygagttttgagygatttttttttttattygtttttttgttttagtgaatttttgttagttgaagggagyggggtttttgttyggggaaaaggaaaatagttygtggtttgggatttgggattttttgtygtttttagygtttttttygtttttyggygtttttgyggtttagtggtttttgygygtyggagttygtygygaagattgagyggtygyggggatygtygygggtttygygygtatttttgggtttaatattgttattatttgatataataggagtagtgtygggggggtattgygygtttagaygtgagttgtgataggttttygaaattgggygt

SEQ ID NO: 11341 - DNA, 1872 bp, synthetic construct
  misc_feature 1..1872: note = Description of Artificial Sequence: Synthetic polynucleotide
  source 1..1872: mol_type = other DNA
ygtggatagaaagtaygygtaaggggtttyggggataggaagttattagtttggggagygggaggtattggatattttttygtttygyggtyggtaygggtgygygtgyggtagyggyggtaggggtttttygttttgttyggggttttyggtygtgtttygtygttygggtygygttyggggttgattygtattattttgtaaggaagtgaaygtttygtaygggaaggggaggygtttgygtyggtygtygygtagtttyggggaygttyggggttgtygtyggttyggggtygtagaygatygygggaygygygagtttttygtttttttttgttygtygtttttttygttatttttgttygagaggagttaaattyggtttttagagttyggggagggtggggatattyggtgtttttttygygttaggaggaagggggagggyggagaggatttttggttagtttgygtygagtagatttaaattaaaataaaaagattaaaggagtagyggtyggggyggtagyggtttttaggtygggatattyggggtggtgygttygggtttgygggggttgygtyggygtyggggaggyggggggagygggagygggygaygyggggaaggggggagttagggggagggygtyggtyggaggaggggyggattygttygttttagtygagtagagtatagtygagtygagyggttygggygggggtygatttyggttagygtyggygtagagagygggyggaggygtaggttatgttgyggttggtgtttatyggggttygggttatygtggatatgtygtaygttygttattttttggatttttagggtttygttattttttaagttatgtagaagttggtggtgattyggttgagttttaattttygygaggtygttattttgagtygggattgttyggtgtygtttttyggggayggagattttttygttyggaatyggtgagttyggygttttttaattttaygttttygttttygtttygggttygygtygygtygygtygttttygtagtttttagttygttygygtgtttatatttyggygygygttygggygtatagtttgagtttgygagatttygggaagttgaattygtygttatttggygaaggygaatgtgatgtgattgttgttggtgtgaatattygatgttatygaaygtttttataattgagggttattttaatttgggatttttttttttttttttagtttttttttttttttttttygtttttgaaataaaatygaygggatttagaaggggaggtttttygtygggtygttygygygtatttatagtttttgygttgatataatttttagggtggagygggagtagtttggaygtaaattgygaygtttaggtaaaygtgtttyggaggaaggaggttgggattyggttggttttttttgttttttttaggttggtagtygtttygtagtggyggagtttgtygttggatgtgtgggtgtgtatttygtyggtgttgtttgygtgttgttagtgtagtgtgattgttgtttgttttttgagtgttaaygatygtygygtggygygtgtttygggtagttgggttagggtyggggtgggggtatggttgtttttgtyggtaygttttgtagatatttaggtgatatygggttgttgygagattttttggtttttttatttttygygttttttatygtygtgttttygttttatttatttttagtaattggygaagtaatagggaggaaayggattttattttttatyggagttatgttygtttaggtttttgtttygtgggtttttggttgttygatttgattggtaaggygt

SEQ ID NO: 11342 - DNA, 652 bp, synthetic construct
  misc_feature 1..652: note = Description of Artificial Sequence: Synthetic polynucleotide
  source 1..652: mol_type = other DNA
ygttttttyggtggagayggygaygtggtttataygygagtttttygtygaggatgaattattagttagttygagttgttatattttattttagtatagttatygygagagtttyggggtygygtyggygtgttttaygtaygygtagtttttygyggggtyggttagtggtgtygtygaggyggggggagtggtygtygygtyggtygagtgaggtagggttataygtaggygtattygygygtygatagttygtgtatygtgtggtagyggttgtgygygtttaggaaggatatttygttttygtaggtygtygggyggtagtagggttgygygygtattygttttygtygtaggygtygtygttggygtagtygtygtagttygaggtygtagaygygygyggtagtttygtaggygtttgygtagtagyggaatagtatygtttygtyggaygygtagtttaggtttagttygtttaygygtatttttagttygygtagttygtaaggtygygtttttaatygygtaygygygygtygtygtyggggtttygttygayggygyggatttgggggtygtttagtttagggygttagttygygtagttttatygtattyggggttttttgtaggagtgtayggtttgyga

SEQ ID NO: 11343 - DNA, 722 bp, synthetic construct
  misc_feature 1..722: note = Description of Artificial Sequence: Synthetic polynucleotide
  source 1..722: mol_type = other DNA
ygtttttygtagyggtgtagygyggtygtatttygtattygttgtttggtgtygtggtygttttttygggtagtttttygggttyggygttggyggtagtggygagyggyggagattttttttyggggtagtyggtgttygaattgatygygtagttgttgygygttgagttttattttgyggyggtyggaygtttyggygtagggggyggygyggygggygyggtgttgggtatygataaygtgtgygagttggyggygyggttgttttttagtatygtggagtgggygygttaygygtttttttttttygagttgtyggtggtygattaggtggygttgttgygtttgagttggagygagtttttygtgttgaaygyggygtaggyggygttgtttttgtatayggygtygttattggtygtygtyggtttttaygtygygtttatggtygtygagygygtygtggtttttatggattaggtgygygttttttaggagtaggtggataagttgggtygtttgtaggtygattyggtygagtatggttgttttaaggttatygygttttttaygttyggtgagttaygtttygaagagggtygygggatggggggatttaagggaggttaggaggagggyggtttggatttagatttyggtttttatagygtttygttygttttttaggtttggggttttgtaygygtygtgagtgaaygt

SEQ ID NO: 11344 - DNA, 858 bp, synthetic construct
  misc_feature 1..858: note = Description of Artificial Sequence: Synthetic polynucleotide
  source 1..858: mol_type = other DNA
ygttygatttaggtttygagtttttttttygattttttttagtttaaaggttgtattygttttaggtttttttagttyggttttttagtttttttttyggttttttttagtttggggttygggtttttttttyggttgagtagtygggttygygattttttttatttttttyggttygggttttyggttttttttagaggtgaggtaggggttatttagaatttygyggttttttattttttttaagattattttygttttagttttttgttttttattttgtttttttaatttgggttttygattattgtttygattttattttgtygttagggattattagtygtttttttygygtttaggggaygygtagyggtagtttttgttgatggtaagggtttgygtattyggaaattttagggtttggggygtggtgyggtttttgyggttagygggtttygtttgagttttagggttttttygttgttggattaygttttttataggttttagggtygyggatgaatttygatttttgttttttttttyggtgttgtggttattgagttaagtttggygagtygaggtgattygggtygggttgygggaggagttygyggtgaggtggtttygygttgtygggygaggtyggtttaygtggagtygggagtttgaggtttttgtaygygggagttgyggaygatggtggttagtgttattgtttaygaygttattgtggtgtgtgtgtgtgagagayggagattttagtgtgtgtygtgggtgttgtttgatyggatttaggayggtgagtaggggyggggtttatygtgtgattttggtttayggtgaygtgatygt

SEQ ID NO: 11345 - DNA, 598 bp, synthetic construct
  misc_feature 1..598: note = Description of Artificial Sequence: Synthetic polynucleotide
  source 1..598: mol_type = other DNA
yggagatayggttataygagtaattttagygaygtttttttygygygtgttygtttyggtatttyggatatttttattttgatagaggtgtagtttagggtttaagatttggttttygggttttaagtttaatttygggttygttagtttagtaggtgyggagttaagtttttttatagaygyggttttttttttaygygaggtttttaaatttygtaaattaayggaaatgaagttaygtttygggagyggtgtttttgggaaatgtagtttagygtttyggaygtygtgtttttgggaaatgtagtttagygtttggttagtyggttagaaygttaggaggttygggtygtttatttttygaggggttygtgggttyggtttgtggaatttgtttgtttygtttgtagygtttyggaggtttttgggagtgttygttygttygygtttagtgygtaggygttagaygtttagggtttgygagagygagttgagtggttttagggtttatttttggtaggagagagggtgggattygtyggttaggtaggtgygggggaggagttggggtyggtgyggggattygtyggaatttygg

SEQ ID NO: 11346 - DNA, 1281 bp, synthetic construct
  misc_feature 1..1281: note = Description of Artificial Sequence: Synthetic polynucleotide
  source 1..1281: mol_type = other DNA
ygyggtgtyggygygttagtagttygyggttaaggttatttgtttttagggtttyggtatttttgyggggaggyggtaggtagaggaygygygygtagtygygtaggagtttttaggygagtgggggaagtatygtaagagaygyggatttggagygyggttattgygttatygtagygatttgggttatttaagtyggygggattgagaggtygttgygygtgggtaggggtttagattgygttygyggtgtttgtttyggtttttatttyggaaygattgtagttttgyggggttygtygtttatatygygttgaggaygttgtttaagttaggygttygttttygttygyggttttagtygttygtagygygtygtttttagaygygygtggttgttggygagggttgagatygygttttygtyggttagtttttagtagtagygtattttttttgtttygygttttygtttyggattygygtygtygtagtttygyggtgatgagtttygagtyggtttygtygtygtygtygttttagtgttttggttgygatygygyggagtygatygtttagygtttagaggagggygaygaggtttttygygygggygattaygagatggtagtygagttttttygttttatgttagtygggttggygtagtyggatygyggtttgtgtttgaggttgggggaygygttggttygygtyggtygttttttygaagttttgggygygtttygyggygtygygyggttyggggygttgyggtyggaggagttggaagagttggygggyggtttggtgygygtygtgggtttgygygatyggtygttgttygyggagaattygggyggygagttygaggygttyggygagggagggtyggtttyggagtttygygygtttygygatttgttyggttgttygygttgtyggyggttgttgtataagtyggtgaygttgttttgygggtttatagtttgtaagygttgygtggagttagggttygygyggtygtaggtgyggygygtgaaygtggtgttgagyggtttgttggagaagtgtttttyggtygagtgtyggttgygtaggttggtaggttaggygyggagtttgtagygttagtagtagtyggaggtygygttgtttaggtgygattaggttttggagttgggtgagtyggttgyggggygggttygttttttttatatttgttyggtttagtagyggggtggggagttggtyggtgggttygaggttttgggttttyga

SEQ ID NO: 11347 - DNA, 1788 bp, synthetic construct
  misc_feature 1..1788: note = Description of Artificial Sequence: Synthetic polynucleotide
  source 1..1788: mol_type = other DNA
ygatgtagttyggagagagtatygttygygtagygaygygtatagatttttttttggagaygygtttttyggygygtgyggtygagttygygtgaaatgtatagatttttyggtgaggttttgtttaygtgtgattttgagtattgygaagttttttttttttattttygygtggttatttaaagttttgtttatatttygtaygtgtagatgttaattttatagaaatatatgatgtaaggatagaaatgggaaygattggaggttgattttttygtgattaygtttygttaaygyggtgygtttatgtatayggygagtaaaygtatatagtyggtaaatagttatttttattatgtttagtttatagttaygygtggggagaaggtagyggagagggyggyggtggtaggagaagtgggaagtygygygttygygtgggttgttttttgatagttyggygttgttttttttttttttygggaayggygtttattygggggtygtaggtttaygygtygggygygttygggggggtttygtagygtygagaaygggataatgaggaygyggtgataggttgggtttttgtygyggtagtggyggyggyggtagttggagttgttygtgtagtttttgtygyggttatttttattttygttttttyggtttttatttaygtttygagggtttttttgaattygaagatttttttgatgtttttagtttgttttttttaggaggagttgttttygtygttttttygggttatggtygaygagygyggygyggaggagyggtygggggygygttggggagggggygtygggggygyggygygggygtagaggyggyggggatgtygggyggttygggttgyggygtagtttttttttttgtagttttttttttygttttygtygtygtygtygyggtygyggtttttttttggtttttatttttgttgttttygggtatagattttttgtygtygtygygygtyggtttttttgtygtygtttgttagttttattttttgttatttttttgtttttttttygttttttttttgtygttygtygygtttttttttatttygygttttttttttttttttttttttttttttttttygygggtttttygtttttttygtgygtttyggtygtttttygtttttagygygtygttttyggggatgtttygttttttttttaagagygtygggttayggtygtygtgttttttggagtttyggygagggygggtaygggttttyggtaggtgyggggygtaygygggagagttttagttttttygggagttggaaayggagtttagtttgggggygtyggggttttttygttttyggygggagggggygtttttgygtggttyggaagygtygggygggygggggtgygyggyggtyggatgyggggygtygagggyggggygttttttygygttgtggtttgtggttygggggattygaggggtaaggygtggggtggggggggtgggggtyggttgttatggygaygggyggyggyggyggttgggatggaggyggaggygggygggagtttattygtattgtattaaatyggttttaygttagtttygggatagattygygaggagtaagtyggggagtttttgggygggtaygygtaggaygygttagtagttgtttygtggtttttttgygagtaaaattttygggggtgtttggtagtygygygggygttttggtgttgggttggagyggtyggygggtttggtygg

SEQ ID NO: 11348 - DNA, 626 bp, synthetic construct
  misc_feature 1..626: note = Description of Artificial Sequence: Synthetic polynucleotide
  source 1..626: mol_type = other DNA
ygtgaggattttttyggtatygtttygygygggtttttgtttygtgtttaggyggaggyggggtggttattgtttttttttttygtttygygttttyggyggttttttygyggttttttgygtygygttttttttaggaggygttttgatttygtatttyggttttttatttttygatygttagttttagggtygtygyggygaygygygattttttttttttgaggggygygggtttyggaygygtygggttttgttaggtatttagtggagggtyggaggtyggygattagttygagtttagtygtttygggagttggygygagtgtygttaygattttttttgttttttgygttygygttgttyggtygtygggyggtygttttagtttttttatatagttttttaaaaatagttygtttygtatygttttgtaaggtagtagggagattygtagygtgttaattygygttygtygttagggttaagtttygttttaggttttgtttygggttttttattggtttttagtgattttatgagttttttgtttattttatatggttataygyggtttaatggaygtttttttygagattttayggttgygyggagaatygaaygg

SEQ ID NO: 11349 - DNA, 1037 bp, synthetic construct
  misc_feature 1..1037: note = Description of Artificial Sequence: Synthetic polynucleotide
  source 1..1037: mol_type = other DNA
ygggtttgattttygygtttygttagtaatagttttttttgatttggtttaaggtttyggttttgtygtttttaaaatygttygtaaggtttagtygttygtygggttttttygttgttttttaagttttttttaattatttgttttagatygygttatttgtaatttgtttygggttggygttatattyggygtttyggygttttttataagtgttttygtttatgattagygtttgtaggggtagttyggagttygggtggggatagtagygtagtttttggtygtagygyggggtgtagaygtygtaygtttygttttttagtygggygtatatygagtagtagtygtagttyggttttyggaygagtttygygtatggtatgygggygttttyggttattgyggttatygyggygggyggygtaatyggygggggttygtaggyggttaggygttygggtgtgtagggygggtagyggaatagtattttygygygygtttygtygtygtygttattygygtttagtagtagtagtagtagyggtagtagyggyggyggyggtagyggtagygyggggtagtttattttyggtagtatgttggyggtyggtagygyggygtggygggygagygagygagygggygggygggtaggtggtayggttttgygagygygggagtygtttttttygttttttttttttttttygtygtygtagtygggttttaaagggtyggttttttttygttttttgttttttttttttttttttttggagattatttttttttttttygatattttttygygtyggtaagtgagtgygygtaygttygttygtttattttygygttggttgygggttttgggggttttttgtttttttygggtttygttttttygtatttttttggtttgattatgatttttgaaggagaatayggataattygygggtttgggtaggatyggygtggyggtggagaagagygygtgtttttgtttgtttttagtttagttygygaggatttygt

SEQ ID NO: 11350 - DNA, 977 bp, synthetic construct
  misc_feature 1..977: note = Description of Artificial Sequence: Synthetic polynucleotide
  source 1..977: mol_type = other DNA
yggttttggygttaattygtyggtttttggttttttggttttgttatttttggyggggttgtgggtyggtttaagattataagagggtttyggygggaattttyggtggtgttygagggatttaggtaggtyggygatttttttttaatatattttttgaagttatygagaygttttgtatttgtygygtttttagagtttgtygtttttaggttttagttttgaggttgyggtgatatttattgggtatttygggttttgtaygtttygtaggtyggtygtaggtagtyggttttgttgttatttttttttttyggtygttggttggtttttttgttttggaggtatagagggatygggygttgaaaggtgtagttttgtttgtggagggatggatattyggagttgaagatagtataggagagaggggatttttatttattagtgaaggygtygttagggygtttgtttttatgttttttttagatttgtgatatygtygtgyggtttagattttygggggyggttgtatgttagggagggagtattttagggttttttgtttttaagggagagggatagtattttttygggtttttagtttttttgggtgtggygggagagttttgggygaggttgygtttatatttgtatttyggtyggttttttyggttgatttygttttggttgatttygygtatattttttttttagygttgtaaggatygtttgaattygttggttatttyggtgatgaattagtggttyggtgtgaagttgygggtgatygagggttgggaygaggayggttattatttagaggagtttttgtattatgagggtygygyggtggatattattatattagatygygatygtaataagtatggattgttggygygtttggtagtggaggtyggttttgattgggtgtattaygagttaaaggtttaygtgtattgtttygttaagttygg

SEQ ID NO: 11351 - DNA, 6206 bp, synthetic construct
  misc_feature 1..6206: note = Description of Artificial Sequence: Synthetic polynucleotide
  source 1..6206: mol_type = other DNA
ygttaygttatatygagagaagyggagaygatatttttattyggtgggggygggggygaggtttttttagygyggattygggttyggggagtgtagggygtattttttttgtgggtttttaagygaaggtatagttygggggtyggggtggagggygygttttagtaggtygggygtaygggtatttgtaggaggattatttgtttgttttyggatgggtggtatttgttgatgtgtygygtaaggtygggygagttgtagaaggtggtygggtagtatttgtaggggaatatttgggyggygtgtagtaggygtaggtggygtttttgagygtttttgttggygaaygatttttygtatattgggtataggtggtattyggyggaygtatttaggtttagtaygtyggttttttygtygtygtyggtygttttttggggygttttttygtygggttyggggtataaggttagtaggttttyggtygggggygttagyggygygtttttggtttgtagygtttggtggtgygttagtaggtgtttgygtaggtaggtttggyggyggaattttttggygtagtgatggtattygtagagttygttttyggagttygattyggataygtygtyggggttyggygtgtttyggtygttgtygtygtygggtgtttttygygttttagttttggttgttgtttttggtttyggygygygggyggyggygggygygggtygyggtttgtgttagyggyggtgygaggttaggttggtygggtagttgaagattttggygtattygggatagyggtattttataygtaygatgygygagtatttgtgttgygttagygygaaygggtyggygtatttttttttgtatagttggtagatgaattygtttagyggtygygtygygtttttygygyggtttygyggygtttttatygggttttttttgattttgagttttagtaygggygaygtggttatttygttttygaagtgtagtttgyggatggttttgggttttttggygttyggggttttgattgttttggygggyggtttygyggyggtagggggygggggtygttttttygggggtygtagggyggyggtagggggtagtggggggtyggggttygggtygygggtygtttyggygttagtygagaaygtygtgtttattttgagttyggygggygygaagagtagygggtygtygtygtaggtgtygttttygttagtttygttygygtygtygtygtygtttttttygagtagygyggygggygtggggaaggattyggtygagatyggygagtttaggttgaagttgygttygaagtatttgtgtttttygtgttygyggtttaygggtygygtgggattgtagagyggygyggggtgygtagtttyggggttgtygaagtgygyggttygygggttttgygggggtggttgyggtttaggygygtaggtaagygyggyggygagygttgtatgggygygtttygygggyggyggyggyggtagyggttyggggatygggttyggygtygggggttyggygygggygttttygtagttgggygagagtagtagtgygyggtygtygttttygtygtygyggattyggtaggaaaygggygtggattttttgttgygttttattaggaagtygyggggtatgttggygyggttygagggtayggtattggttyggtttttttttygygttyggtttyggyggtttttagtgttttyggtttattgttygggygyggyggttgygggattygygtggygtyggygayggttyggtttagttttgygttttgtaygygygtttttgttttygggttyggtagtygtttttttttaayggggggagggggttattgttttygtttttygttttttttggagttaattagygygttygtagttttttagtttggtagggtgggagggygatggggyggttaaaagggggtygggattygggggtygttyggtaggtgyggtagatgtatttgagggygyggggttttygygygygtttttggtygtttygttyggygtygtygtttygttyggtttaggtataygttyggtttygtttttttttayggtttgttgtttttttatggggaggygtaygtgtttgggttttgtgtttttttttyggggggygyggagtygttaaatgggttygtttattagygygataatgtaygtttttttttygygyggggattattygygggtygttagtaaaatagtaataaaggagaagaatggttttaaatatgttaggagggtttaattygygagtyggagtygagggggaagttgtgygygttgattgggtgggggygggggygygtyggggyggtgygggggagatygttgyggaggygtagtggtttygygtggtgtttgggaaataaataagaattygagagagtagtagggttyggayggttttygttyggattttggayggatgggtygttggatttaagaggttaagtaaaagggtttttyggggttttaagtgtggatagggggttyggttttttggtagtggtygagggygatgtttgtgttygtagttttygygygtttayggggttagagaaggtttttttygagtttgagaaggaattggtayggtttttttagtttttygaaagygygggattggagygygggygggttgggttgggtttttagaggaaygtgaatttttgaatttttgggtttttggaggtttgggaatggtatttttggyggggttygatttaggtygttyggagttttygygtggtttaaggttyggttaattygggtygagttggtygaagttygaaaygygyggtyggtttygtgygttttagtgaagttggttttttttttttygygyggttttatgtatttttatttygagygggtattttgtttgtyggttgatattagatgttaaattaagggttttaattaaggygttgygaaataaaggggttgtttgtttgggygtagtttttayggagtygtgttttttttatttttgtgaaggaaattaattttttgttattgagtttyggtygyggttaatttggaygtaaaagagaygygtgttggayggggggagggggggtaatttgtattttgaggtaggttgaggttttygagaggataagtygttttttttgtgttattaggaagagataatagygaagatttttttygtttttatttttatttttatttttgttgtygtttygtttggatttagattgggtygtttgtttttattttttgtttagtttagtttygaggaaatataaaaggtagaattttygggggatagggtagagaattttaygagtgygtagtggttttgatygtttaatattggggaataaatagttaagttatataaaatgttatatgttgtgaggaaaatgttattttattgaaagagaaggaaatatttttttgtaaagttttgtatattagatagattttgttgagttttatttaygtttaattttattgaaggtatttaattgttttggattttttttttgaaaatattttggygtagaaattaaatatgtaaaaatagagtttatatgagttataagttgtgatggggatagttgttaggtttaattaattaaggggttaattaggttggttaattaagggaaagatatttgataattttatgtttgtaatattttaatttatatattgaaaagggaagaatgtatatagtgaaatatattttgaaaagttttattttagttttaaaaatgttgtggtgagtgttagtttttttaaaagttagaaattttaaaatgagtttatttaaaatttataaatatatttttatttaaaagtaattgatgttatttttttgtttttttgagttttgattaatagtgttgatgaaattagaagtgggaaaaggatttygagatagttttggttaattttattttttaattaygaattttatttggattgtagaatagtatagggygggggttyggtttgttttattyggttttgtatatgtaatattttttttatttaatagataatagagagttagttattttgtgaattttttaaaaataataatatttataattgtaaataagtygtggggatgggaaatyggtatttttattaataaaaaaaataaaataatttttgygtgagtgaatttaaatagggttttgaatttagttaagggaatttattaaaygttattgagatattgagatttaatgaattygtttttttttttttatttgtggtttttagttttgttagygtaaatgaaatttgtttttagaygggtatagttaaaataaatggaaatttgaaaggtattagtattggaaattaattttattattyggggttggaaggagttaggttgygtaygygygtaygtatatattagygatttttaagtaggtgtagtttagttygggtygtggatygtagtygttttttgygtgatttttttagaatttgtgtattygtatgtatggggatatygggtygagatatttgttttygtttgggaagagtaaagygttattatagtgygttttygaygtyggttttggygtaygygattyggagaatgggtygygtgaagttaagttgggggaaatagygyggatttgtttttttttaggggggtttygygaaagttagtgaatataaggatttaaggtagagtatttaaggggtttttttyggttttaggtgatttttttttttttttyggggttttggttagygttttggaaaaatttygggtttttttatttttttttgyggatttygyggtgggtttttttttygaygattgyggagttygaggttttaggttttttaattttttttattttggtgtgyggggatgtygtyggggagygygtyggggtttattttgatttttattayggttggaaattaaagttaaggtaatagggagtttgtagaaagygygaagtttggaaataagagtagaagyggggaatttttgyggaggagttggttttttggggtgtttaggagaataggaggttttggttttaygggaggagtygggygggttygtatttttatttygtagagggtatygygtttggagaygtyggygttgggggtgaggtgttagygttttttattattattttgttgtagattttttttttggttttatagaagtttttattttyggtttttagtttttygagttataatyggtaggaatygtgygttatygttgtagtgttygtygttyggagggattagygtttttttgygtygggtgygttygattygagtyggtgagaggttttgtatttgtaggaatgaggggttgttgtgttagttttaggggtaygygagagataygygtagttygtttggtygttatttygttyggttyggttttaggtatttttygggtttttygttygygggtygttgtttttgttyggygtattagtataaagttgttagggatttttygtttagataattttatataaaaggagagtgtatgaaagagagygaataagggaygattygygaggttgygtygtgygttttygyggggagggatygygtttaagtattttttttttttygagttttaagtgttttttggtaatttgttgygygtttattattyggtygggggtygayggygtggttggttattttttttattttttygagagtatygtyggggttattgtaygttttttgaagtgtttttagggttgtttgtttttgttttagtgggatygtygggttagggagggaggagagygggtaggaaggttygggygggyggygggaagggygaygtyggygaaagttggtagaggygaagtttagaaggtgagaaagttataattaaagaattaggttagggagagttaggayggtaygggatttatygggatgatattgattttggggygtaagaggtgttttttatttgtgaggtgttggyggtygttagttygtgygtttyggttttaaayggaattgataaaatttagygaaattgattagaaaggttgyggygatttygattttttttttttttttttattttatttatatttgtatttygtttygtttgtygtaggaggayga

SEQ ID NO: 11352 - DNA, 574 bp, synthetic construct
  misc_feature 1..574: note = Description of Artificial Sequence: Synthetic polynucleotide
  source 1..574: mol_type = other DNA
ygttagygttaaygaatgtggggatagttygtttggygttygyggtygtatttttatygggtagtttygtatttttttttygggtttttaagtygttygtttyggttgygggagatttyggygaattatattygagaggggggygygtggggyggagttttttttttattgttttttygttattagtygtttttgtygtygagttygtagtygttagygygtttygagtttttttaggttagaggttttygtaggygatggyggataagagggyggggattttagaagtygyggygygttygtygttyggttttgttygggagggggaygygygtayggttttygyggttygggttygagaagttggggggygygggtttttttatttygtagygggtttygggatygttttttttttttttgggygyggggaagyggtttttayggygattatttygagtttggaaaatggtygggttygggaygaagttttagaaatttgtggtgtagaggggttagggattygggtaggagttagygagaaggtygaggaygygaataaggaggagggygt

SEQ ID NO: 11353 - DNA, 3438 bp, synthetic construct
  misc_feature 1..3438: note = Description of Artificial Sequence: Synthetic polynucleotide
  source 1..3438: mol_type = other DNA
ygtgtttgtttygttttggtygtttgaggtyggagttatatatagtttgtatagattygagatattyggtttygagtgatttggaaaygagtgtgtttttattgygtttaaataagaygaggatatttataaggtgygagtttttaatttttagttattggtaggggttgygtagyggtatygtttaggttttttttttaggyggtygatttatttttgyggagagtaygtttttygaagagggttgtagaygygtttttttagtatttaatttgttattttataagattgagttaagttttagttaaaatatatttattttattaaaaataggyggtttaatattaygtygtattttagttttttygagggygtaagagaatagagagtttttagattaattggaggtaaatattttattttttaatatttaaaaataatttaggygygtttgtatyggtgtggtttaygygatttttaygygygaggttagtygggttggtttagygtagatagyggtygggatttatttatttagtgygygttttttttgtttttygttgygygygtttaaagttagaaagaagaaggtgaygygggaggygggtygggttttygggtttagygaattygygatttattyggtttyggygtttgagtygaggttttagaaagaattygttaattttagttattttggatttgggtagggagggtgygyggtttttaagtttagtttggatgtttagtgyggtgtgtttyggttttttygtttgtttttyggggaggttttttattyggtggttttgggtygttttattgtggygtttttatttttggttatyggttttttttygtttaggatttttyggtttagggagtagtygaygggtattttygaaygttggggtayggaattttaayggggygattagagyggagttygyggttygaggttygyggttgagtaygaagaygggattygaggatttgtatatygttygaggggaatttgttttgggttttggtgtatatatagtatgygttttgggttggtttgggttgggttaggtaggggagatttggttgggtaygaggygtygtttaagtttttyggtygtgggtygggyggtygyggygtttttgygtatagtggttatttggggtygtattttatgtttgtttgagttttttygyggygggttgaygtygggatttgtttaatygttataaaaygtttaaataaaaatagggtyggttttttagtagtggagagttattyggagtatygtttygggtyggtttyggtttygaggtttygggggtttaggatttygtgygtgtggyggggaagaggaatttagagtttttgggttgttgtttttttygtygtttttattgtgaatattgtgyggtggggtgaaygyggggagyggyggggttagtggagtygaattttagggttttgygattgtattygttaggaggggttttygtttggtttgagaaaggttttttgaggttaagagttgggtttgaatataattttyggagtttygagttygttttttttaatatataaataygygtagatttttagaaataggaaygtaygatatatayggttagaagtygygaggatatatagagygtygtttattgggygggggtygtttgggaataaagggtttaggaggygttgtttyggygtttattttgagtttttttgggggtgataygggatgggggtggggtgtaaagggaattgagggaggagagtgygygaggaggggaaagyggtgatttggtttagaggtggggygygtattttaggygagygtgygtgggtygggatttgtagggtaygggggtgggtttaggttggtygttttatttygttttagygtttygttaggttttygtygtttyggggtygttygggtygttagttagttgaygyggggggygggggagttgttaggygygtttygttttgygtygttgggtygyggaggtygtgtagttattggttygygtatygggtygttygggttttygtattttagtgatattaggaggygataaaaggttgyggygtygtyggatttagtatagttgtatygtygagttgygagyggttgygagygagagagygtaagagtaagagagttagagagygagtaaygggtattygttttaygtttttttttagttttatygygygtttygtttgtttttttatttygttygattttattyggttyggtttttgygygggtatagtttagagttttggggyggtgtaggtagtttygggatttttyggygygtygtygygtttttagataaaggtttggtyggyggtttyggttygttgygttttygtttttygtttttttagttttttttygtttttttttttygygtttggttyggygygtttyggtyggtygtaaagtttttygggyggtagyggyggttgygtttygttttagygatggtygyggagttgagtatggggttagagttgtttattagttygttggttatggagtatgttaaygatttygatttgtttaagttygaygtgaagaaggagttattggggygygyggagygttygggtaggttttgtataygtttgtagttagtyggttyggtgttttttatatygtttagtatttygtgtagtttygtgttttygtygtttagttttagttygatygaatagaagatatatttygaggatttgtattggatggygagtaattattagtagatgaatttygaggygtttaatttgaygttygaggaygyggtggaagygtttatyggttygtatttagtgttatagtygttgtaaagtttygatagttttygyggygtttattattattattattattattatttttattygtattatgygtattygggygtyggygtggtttaygaygagttgggttygtaygtttattygtattattattattattattaagygtygtygtygtygtttagygtygttagttyggygtaatagttgtttattagttatttygggttygggtygtaygygayggtttyggygayggyggygggyggtaayggtagygtggaggatygttttttygaygattagttygtgtttatgttygtgygygagttgaatygttatttgyggggttttattaaggaygaggtgattygtttgaagtagaagyggyggattttgaagaatyggggttaygtttagttttgtaggtataaaygygtttagtagaagtattatttggagaatgagaagaygtagtttatttagtaggtggagtagtttaagtaggaggtgtttyggttggttygygagagagaygtttataaggttaagtgygagaaattygttaatttyggttttagggaggygggttttattagyga

SEQ ID NO: 11354 - DNA, 4088 bp, synthetic construct
  misc_feature 1..4088: note = Description of Artificial Sequence: Synthetic polynucleotide
  source 1..4088: mol_type = other DNA
yggttyggtttggttygggataygtttgtttygygtatatatagttagtyggttttgttygaaaygtattaagtygygtttagyggtaatygttttttttttttttttygtygtttttttttygatttyggygttaygatttttttgygtttttttttttttattgtattatttttatygtttygatttttttygaggggttgatgttattagtttttttatttttttyggttattttttttygttaaagtttttttttggygaggtttttttygttattayggygttttttagygttattttttttttttttygttttttttttttttttttttttttttttaataaattttatattttayggaggygggtttttttttttttattygttattyggttttttgttttygaaattttttttttgtygtagttttyggagttttatgggttttttttttttttttttaataygtatttaaatttttggygtygtgtaggtttygyggaaaaagagagaaagagagaaagagggggagagygagagygagagtaagagagagatattgagygggtaggtygggggagggggattygygttygygtygttayggtttttygtttygtttttgagttttygttyggtygaattygygtttttgggtttttttttyggtttygttttttatagatagagttygygaaygggyggggggttygggagygygygttyggggyggggggygggttyggygygygyggtttgyggggygtttttygagggttttygggtyggggtyggygtttttygttygtttttatttagtagtagtaggyggtgygtggttyggtagatttgtttgtttttttgtagttgtttttygatttttttgttggttttaygttgygtttttttttygttgygttggttttyggttttattgttttygaggtagtttatggyggyggyggyggyggyggggygyggtygggttgyggyggyggygggygygggyggttttaygtgggtygggagggtyggggtagygtygggygggygggtygggygygggttyggtttttyggtaaggagygygyggggyggattgygggtygygggtygyggggygygyggaygggygggaaggggagggtgtyggtyggatygaggggygygygtagtttttygtttttygagtygaggtygagggggttgatggtygtygtygggtygaggyggattagagtaggagttgygggagttgttgtygtygttgtygtygtygtygtttttattgtttyggtygggttttygtygtygtttygagttaaaagygtygyggygggyggggggaggyggggggaggaggaggyggyggyggygaggggggtggaaggaggaggaggaggaggagggtygaggagyggtygyggyggyggyggyggttgggagggygggagtyggyggagggaggyggtttttygggagttyggggagggggttttttygttygygttyggtyggggaygggaygggtyggggagaygttttttatttttygggttygggtagtagttyggttgagtygaggggggagagggggygttttygygttagtgaygatttttygtaygaygttaaygttttatttttyggatygygtygttyggygttttygaggttttttttttttttygygggygtygtygaggggttggggtgggyggaaggggagggagygygygttyggatttaggaaaattttygaaagagygagagatatagagagttagagagtaggagtgtggaaaaagygaggygagtaygaattaaaggatagagtaatygaaaaggaaaatgtgtttatatatatataygaataygaataaaaatttatattatatagygatggtggtgtttggtggyggtggyggggtggggggtttgattagatgagtygtttttygygttttyggygtygggygttatggttygagtygaaggygtttttggtttyggagygttygyggtttttgygtttggygyggtygtttaagtaggagaagaaggygtagtttaggaatattyggaagtagtaggtygtttygaataygaagtygtagtygyggttttgtttygtgygtttttgtagtaggaagttgagtatttaygaggggttgygtatygagaagattaggaatattaygaggggtaggtgggygtttagygygttagttttgagyggttygggtygttataygatgtttttaaygygyggygtygygtagtaggygtygttttygtygttygagttygtgttttagttagtttaggttttattygtgttttyggyggyggygtttttttyggygttttygayggygtttttttyggygtttttgtygtygtyggyggyggtygyggyggyggyggtttyggggtatygggtttttttttgggtttttggtattttttttttttttttttttagtattttttttattttttttttttttttttttttttttttttttttttttygtttttgttttagtagttttttttygagttttttgygttttttgtttgttaggaatttttyggggagygtttttygygtygggtttttggggtttttygygagtttttyggggttttygttttttygyggygygagyggttttttyggttyggttaaygtygtagtygtygtygtagtttyggtagttatttyggtagtygtygyggtygtttttttttygtttttygtygttygggttttgagttttatggttatttttagtatggtggttyggttatttyggggagttyggttygygtttggttygggttttttgtttgttttyggtttygggttgttyggttttygtgygtttygtgtyggggggtttggttgyggttttygtygygttgtttyggggtygyggagygyggttgttygggtttygggttgttgggttggttgtttaagagttagygttaaaaaggatgagtaaaygaaaaagggataagaataaattaaaaagtatttaataatagygagaaattaaaaagtattaagaaatgttaatttaaaaagaaaagtgtaaaggygyggatggtaggagtttgtttatttttaggygttttttggtttggtttttgggtaygttaatggagaagagaaaagagagagaattggggggtgttyggaggygtttyggggtaaggtagyggygttygggygtttttgttttgtttyggattyggyggtttttgtttgygtygggygattygtattttygygggaggtttyggygtttttygatttatatgtgagtgaggtgtatttataygtaaggtagygtttgtyggtygttygtygtygtttygygtygggataggggttygttttagtygtygygtygtagttyggagttagagagtaggggagygtygygtyggttagttatttgaygtagttygtttygyggtgtygaygygattgagtgttttygtyggggagtagagtttttaatyggtttygatgaygttttagtttttttagaggatygatttatagtagyggtttttataaatygaaggggaagygygaaaaatyggtttatyggggaygtatttaaatgggtygtygygtattttgggggtgtaggtyggtgtygggatygygygggygtgggtygggggygygggggtygygatggyggggggygygggygygtttaaggyggtgggygtttaatttygttttttagatttgttttttaattttyggtgagtggtgtagttttgggyggygtgtaaagtgtgygayggyggygtttatttttgttgtgygtttttttatttttagttatttatttygtttttttagyggygygygttygtygaggtaggtgttagagagtygaattygaattatttgygaygttyggayggagtttygtattttyggaygagaaaagtgygatgggagtgtaaagttttttttgttygaagtagtaggygygtyggtgttaygggagtygaggagyggtggtygtggttgtggagtyggtgttygaggygt

SEQ ID NO: 11355 - DNA, 522 bp, synthetic construct
  misc_feature 1..522: note = Description of Artificial Sequence: Synthetic polynucleotide
  source 1..522: mol_type = other DNA
ygatatagttttyggygygtygggtattgaggttttggagtatagygtggggggtttggtatagataygatttaygatygggtygattttyggttagaaagaattatgtttyggtygttygggtygygggttygyggtgtatttttgtaggtttttattttgtttyggtagaggtttgtaagaattttgtgggtgtttttyggagygggtagaggaggagtttagygtygaggtttaggygygtttygttttygttttttttygtgtttttttttygttgttttttttttaaaggtygagatttggaygttgttyggtggtttyggygggggttttgtttttggtygttgtttttttgaattttaggtgagaagaataaaaygttttgaygttgttyggttttyggtttttggagaggaygggtygtttttgtygagagaattgtgyggaattaggaagygttggtgttttttygtttttaygggattaagygaaattyggttttaaaygaagtaaagtygg

SEQ ID NO: 11356 - DNA, 2260 bp, synthetic construct
  misc_feature 1..2260: note = Description of Artificial Sequence: Synthetic polynucleotide
  source 1..2260: mol_type = other DNA
yggtattygggtygaagygtttggttygygttttygygygggtttttttggaatygtttygggataygyggttttttygttgttggattttttttygagttttagtttgttaggtagggattttttgggygggyggyggggaagygtygagtyggyggtygtttatatttttttttaygtagtataaaggatattygtyggtaaatttttttygtttttgattygggtygagtygggaatttagygttagttttgtttttggyggggttgaggttttttttatattttaggttatttggtaaaygttttgaggttgttattttttttgggtttaaggtttaygggttgaggtttgttttygygtggagtttaaggtttaygggttgaggtttgttttygygtggagtttaaggtttaygggttgaggtttgttttygygtggagtttaaggtttaygggttgaggtttgttttygygtggagtttaaggtttaygggttgaggtttgttttygygtggagtttaaggtttaygggttgaggtttgttttygygtggatygtygagagttyggtagattttttttaaggttttgattttaatatttttagtgttttgttaattatattttttgttttttttttttattaaggttatygttaagatattttttttttttttttttttygtygttygttattttttttgttttttttttggttttttttttagttttttgggtttttttttygygttgttttttagttttagttgtttttttyggtttatatttyggtagttttttttttttttygttttygggtattttttttttttggtyggtttttgaaatttagtaggttyggtttyggttattgtttttttttgtttgtttttatttggtttgtttttttaattatygtttttttatatttttttttttttttttttggtaagggggayggggggaaayggggtattatattttygtttttygatttygttattttttttagtttygtgagtygygttttttygttttttttaggttygygattttattttgaggttttttagatttygtagggttttttaygttattaagtttgtttygattttttttygttgttttttatattttttgtygyggygyggtyggttagggatttatttygaggtttagttggtgggggtgttggggtgygygyggattyggtatttayggyggyggyggyggtagtagtagtaggaggaggagaaagaygaggaggaggaggaggattagttgagyggygttttttttttagttygtagygygtattggttttttggggtattttygggagagtattaagatyggagattaggyggygatataggtaatygttgttgtayggggttgggtttagtyggtttttagaggttagggtagggggaggtaggattgggaaggagggtyggagaagtggggtgtagagggyggggtagygagyggttaggttyggaggaaggygttttaggygtttagggatgtygtygttygggttgaygtygtyggttttttttttygttaggygggygtttgtagtygygggygtaygggtttygtttygtttatyggttygttgtyggygttygyggtgygtttygttttgtgtttttygtagtyggygtgtatttggtgtaagtaaaggyggttagttgatgggtygygygyggattggttgtttygtygtttttttttttttygttygatttttttygyggtttttygttttygttttyggygyggtttygtgttgggtattatttgtggatygtttaataaaggygtagygyggyggggttygggtggtygggtygyggtygtygttttttgtttaggggayggtaggttgyggttgggtagggaggygaagygtattgtyggtttttagtaaaagatagattaaaagaaaatataygttygtgttaggaggttagttaggtataatggggttttatttttttgyggygtagaattygggttygggggttgagaattagatatagttyggtttggggttgtgggagttaagtttyggggtgaaattygattttgygttttaaaatatagggygygttttygggttgtgtgtgygygttygggggygtttttygtagatttggttygggtyggtgtttttgtygygggaaggaggattyggaygtttaatttagyggygaagtygttttttattggaggaggtttttygaaaaygt

SEQ ID NO: 11357 - DNA, 1502 bp, synthetic construct
  misc_feature 1..1502: note = Description of Artificial Sequence: Synthetic polynucleotide
  source 1..1502: mol_type = other DNA
ygayggtgagygtggagtagttygyggtttygttgttttttttattttyggatttttagtttttttagagtggaggggtaagtatatagtaagtatttgatattygttygatttttgagttttttatttgtaggagttagggggtttgtttttygtaygttttttgttggagggaggaaygagggaaggagaaaatttaygttgaggtygttggtygattattttttttatttttyggataatattgatgggttttattaaggaaagtygaattttygtatgttygaggagtgtyggaggtggttgtgygtttagttttttttggtaaagggttygaagtattygtttatttaaaggyggtygagagttatattatttgtttgtatgaygggagatatygaaaygttttttttgaaygygatgataaatatttttttttatttagtagygaygtgtaygtgatagtttttgggttttygtaattaygtggaaatttggaataggtttgyggttgtatatygttyggaygtyggggtttttgygtttttygttttttttgatygyggttgggtagtygagtygtaggtagttgggggttttygaaygtygtttttgtatygygtygtttttgtttygggtttyggtagttttygggttttygtattgttygtygygttttgtttatagggaagygtttttttaggyggyggyggttttggtgyggatttttyggtygtagttatgtgggattygygggtagttaggtgygtagyggygygggaagtattggggtatttttggtttttygggttygttattttttttggygggaggyggtygygygyggggattggygattttgaggtagyggtygaaygggttygttyggttatttttgtggggtttatagttatttaggtgtagattygagttagttgygyggggtyggtygygggggayggtttyggttttttyggttyggagggattagggtaygygttgygataggattgyggyggygygyggtttgtttagtttttatttyggtatygaagtygtagttttygggtttattttygtatttttaggggttttygggggttgtygataggtttttgattagygagygygttttyggggtaagtatttttggygggtagaaatttgggagyggagtatagyggtgtaagggaatygtgttaggygggaagggyggaatttgyggggaatttggagygygttggttttttttyggtagtaggaggtttttttttttgttygttygattgagggttgttgggttggtttaaattggattgtayggtttattagtttgggtttatygagtttagggggaaggtagtagtagggatttaaggttgggaagyggagtttttagaagtttttgtttttgtttyggagygttttygaatyggagttyggagtttgttgtttgggaggygygttgygtttttttttaattttttgttttygtttygygg

SEQ ID NO: 11358 - DNA, 510 bp, synthetic construct
  misc_feature 1..510: note = Description of Artificial Sequence: Synthetic polynucleotide
  source 1..510: mol_type = other DNA
ygttttttgtygggagttattygttagtttttttttttagttyggttgygtagygtttttaatttaatttttggatttattttygttttagtttttttygtgtttagygttttttgtaaatgattttttyggtygggtgtttygttttttttttyggtttttttygygtggtttgtttttygttygtttgygttygttyggtttttttgtttttgygtttttatttgatygtaaaggyggttagggtagttttygygyggtttgatagttayggtttttagtttgtttttggaygtgggaaattygggtttatagygtttttaygtatattgyggtatagattggygttttttayggygtttttattggaaagygtttttgtggttttggggagagggyggttttattygttatttttttyggagttgttttygtttatttttatgggaggaaatygtagggygtgtgagttttygatttttygtttttattttttttaggatyggtygt

SEQ ID NO: 11359 - DNA, 940 bp, synthetic construct
  misc_feature 1..940: note = Description of Artificial Sequence: Synthetic polynucleotide
  source 1..940: mol_type = other DNA
ygggtaattgttygggttttgtttatttttttygygggtygtatttgttaaggtygtatygttagygttttttgtygttttttttgtatagagattygygtttattttygtattygtattygtattygtatttgtttttatttygygttygttttgygtygaggtygygtagtttgygggtagtggygggggtaygaggatgygaatttaggyggggtygggagttgggygygttttttagaattttygttayggttaggtttgagttttatttatttaygtygtattttttttttttygtgggggtttatatggtygtgtygggygyggtttygygggygyggygatygggygataaygyggyggggayggtygygggttyggttgtggygtatygygagtygaggyggggayggttaggyggygyggggtagtgggyggygtattttttataggtygttygggatgtygtygttattttygttaygtttggatygygaggtttygygggtggtttagtagtttttggyggygygggygaaggttygttatttgttygtygtygttgttttygtgtygtygtttgtttttttatagtttygtygttyggttttyggygtygtygyggttyggttygttttagygggttygtaggaygttygygtatgygttattttttgtygygtaggggttygygttgttygggttygygtygtttygagttygygygygaatttaygygtygttgttgygygttagyggagggaaattygygagaagttattggattgttyggtttyggatyggtttttagaatygttggttyggggtttttagttgtagtaaatttyggagggggygaagtyggttaggtgggygattttttttattyggattttttattygttttygtttttagtgttttttgtttgygtttyga

SEQ ID NO: 11360 - DNA, 2718 bp, synthetic construct
  misc_feature 1..2718: note = Description of Artificial Sequence: Synthetic polynucleotide
  source 1..2718: mol_type = other DNA
ygttygggtygttttttttgtttagtttygagygyggagttgtttaggatttttagaygggtgygagttattgtttgaagttttttttttttygtyggaagaggatgtgtttaaaggatygtyggaaattttggttgaagatygtgtagatgatygggttgagygagttgttgtagtagtygatttagaagaagaatttgaagagygggtygggtatttggtaggtttygyggtagatgtygtataggttgtagttgaagaagaaggggaattagtagagtaygaataygtttatgattatagttagtataaaggtgaagygtttttygygygtttgggttattttgyggyggtataygttgttgygygttyggygtyggygygataggaagaattygayggagygygagttggygygygataggyggttatygggtttyggggatttggaggyggttagygttttygatttagtygttttyggtttygttttttgttygttygtatygttygygttttttttygygttygttygtygtygttygttttgtygtaaygygtttyggygtygtygtttttyggtygttgygttgttttygttyggttttaygtyggygggygggggygygtagtgttygttttygtttgygtttgtygtygygtttagttygttttyggtagtyggggaygtatygtyggggtttaygggggygygtttttygttgagygtgygygtgygtagtttggttattyggtagatgygygygtagattaggtttatgatgaggtagggygygaagaaggagtygatgtaggaggataggatgtattaggtttygtygttgaggtygtattgygggtaggyggygtygtygggttggyggtagagygagattagyggygggaaggagatgayggtygagatgagttatayggttaygatggtggttttgaygyggygtggtgtgygttttaggttgtattygayggtttgygttatygattagtagyggtttaggttgatggtatatagatgtaygatygaygaggtgtaaaatagtatatygagygttaggtataygtygtattatatttgttygaagtattagtaggttatgagttygttggttaaygagaagggtatgattagygtggttattaggatgtyggtygaggttagygatattaggaagaggttttgtggygygygtagygttyggttggttagtayggygattattattagtaygttgtttattayggtgaagaygatgaggaagtttattayggtagttagttttgttatygygttygtygagtattggtygygyggyggtttttaggaagttttygaggtattggtaatttygtygttgtttttttygttygygtygttygtattggggttygtygttgtygttatygttagygtygtygttagygtyggggaygttatggttttttygygagttaygtygttttttttggagtyggggygtagtygyggtagttygggygttttttagtyggggtyggygttygtatygtygtttgttgttygggygygttygtyggggatygyggygtttagtagtyggttttyggtygtggtggtttygygggyggygygtyggagagygtggttgtygggtttttygtagttgtygagygtgtaagtgtagagtaggaggygttyggagygagyggygaygyggttgyggggggaggggggtaggtttyggggttttygygyggtttygttttyggttyggtttayggggagygtttyggygtygagtttayggygaygyggygttygagygggygtgtttgagyggtttygyggtttyggagtttagtyggggygtaggygataggyggyggyggttygggygtttygttttttattyggtyggttagggttyggygygtyggggygtyggtygtygttttttygggttttygygttygygygtttttttygtttttaattttattttttygggyggggygtyggygtygtygygagtttttyggttgttttygggygygggygtttttygyggtttaygtttggtygtgyggtygtygtttygttygtyggagttgygtygtygtygtygtygtygttttgygttgggygygagtgyggtygtttgygatyggtttttaatttgggtygagttgygtagyggggygggygygyggggyggggygggtygygggttttggggagttggtygggaatyggagttygyggtygtttggtygaatttgttygygyggygtyggggaggagttyggggyggyggygyggggygygygttyggygagggygttttttttagggtygtttgtagtttgygggayggggtygagyggyggtyggtttgggtggtgagttttagaagttgttttttttaagattggagtttttttygtttttttyggygtaggtatgggygtaggygggggygygtataygygygygygtagtaygggyggttyggggtttatggtttgatggtagagtaatttttygtagtttgggggaggaygygaygttatttgygtgygtataggttttgtygagtttagggttyggattagattttggatyggygtttttygttagagttattttygtatttatttyggttttagttttttyggtttattttttagygttgttggagtatgaattataattaayggygg

SEQ ID NO: 11361 - DNA, 2661 bp, synthetic construct
  misc_feature 1..2661: note = Description of Artificial Sequence: Synthetic polynucleotide
  source 1..2661: mol_type = other DNA
ygygggtaaagygtgtttttyggtgggttataagtagygttyggtttttttttttttygttaagttgtttgatttttttttttaggygygygygtatatattatatttatatattttaaaattaagattygttttataggatttgggaaaagaaaaagaaaaaaaagtttttaattattatttttttttygtygatttttttttatttttygttttttttttagygggtagttaaggagagttagaggygggggaggggagagggaggagaagygaygtaagtgggtagttttttagygtyggygaggygygggaggaggagaagtagtggggaggygtagtygtttatttgyggggtagggygyggaggagggattygggttgygygttttygggtygaggaattaggaygygttyggagtttygtaygyggttaagttyggggygtttttttttttyggtygggygaatttaaggggygtagttttttgttttgatagagttggtyggyggaggygtgtagagyggygagtyggygagttaggttgagaaattygagtygggaataaagaggggtyggattgagtgtgtgtgtyggttygagtttygggtagaggtatttgggttygaggttttygttgtgatttttygagatttygtagtgttttttattgyggagttttygygtttgtyggtaaaaattttatttttggtaaatttttttttttttttttttttttttyggtttttattttttgttttttttttttttttagtagattaaatgagtttygagaagaaaaatygaagygaaagggaagaaaataagaagatttaaaayggatatttttagygtgggtggttttttttttttttttttttttttttattttttaggaagtggaygtttygttattttttgatttttgtatttttttttggggtaaayggggtttttttgtttagatttttttttttttttyggaaaataaattattaagtyggtattyggggtaattatagtggagagggttttygyggagaygygtygtyggatttttttttgtattttggggaggygtgttttttttagaatyggygtttttygygygtaaatttyggygaygyggggtygyggggtggtygtyggggtagtttygtttagygygygtygygtagaygttttyggagtygttagttatygtagttttygtygtttagtgtttttyggtttygggggygggygtttgygtyggttttygygaagygggaaagygyggyggtygtygggattygggygtygyggtagttgtttyggttgtyggtyggyggtttygygttygttygtttygttttygttygttgttttgttgtaygaatttttttaatttttttttttttttttatttttgagttatttttttgttttttttgttgttgygygggtgtttttatagyggagyggagattatagagtygtygggatgttttaatttttyggaggaggtggyggyggygggggggattyggaattttgygttayggaygagatgattttttttaaggaygagggygatttttagaaggaaaagattttygtygagattagttatttygaagaggaaggygatttagttgatattaagttttttttggtgaaygagtttgaaattatttyggttagtaayggataygaggtgagygggtygttgttttagtttygagaggygtggygggtttttgggaaatttagagagggaggaagggaaygaaggygttyggtygttyggttgagggtttygagtagatttttygtttgttttggggtgtgtgygtagttgggttttyggttygtagtgtgtgtgtgtgtgtgtgtgtgtgtgtgtgtgtgtgtgtgtgtaggatgggaggtagaggggtagggtaatttattttaaatggattagtttagggggttyggtggttgaayggttggttygygggtaggaatttataatgtttygttttyggtttttttgttgggttgaggggtgtygtgttttaaagygagtagggttgaataaygttattgataaattttttygtgggayggaaaataaagtgtataygttattttttggtagatgtttttgtaaaagtgygttaaattattaaaggtttaggtggagaygagtagagttataggygggaggaaggggaggygggygtgggttggggtaggyggggtygtttttattatyggtgagtygggtygyggggagtaggtyggtygatggggygygtattygggttgygggggyggtgyggggtttagtttttgyggttttagygtttgggttagtagttgggagttgtgggtgygtygagtygatttatygtaagggtatattttggttgtatygtttttaattttagttttttttaatygttattatttggaaataaatttataatttttatttggggtttgggatyggattaggttttaaatttaygtagaagaaaggyggagaagtagyggaagtygggtattagttttgtagggtggaaggygttttatygggttttttggttygttgygggygatagagttggtaatttgagtagagtaaatagagataygtgggtgttggttagagaaagygyggagtagggtygygt

SEQ ID NO: 11362 - DNA, 801 bp, synthetic construct
  misc_feature 1..801: note = Description of Artificial Sequence: Synthetic polynucleotide
  source 1..801: mol_type = other DNA
yggttattaagyggttttttygtgagtttygtttaatgtttgtgygtttaaattagtagygttygaggaaygygttaattgggagaagtgaattgagggggttyggyggtygttgaggaggggagygygygggaggaggggygaggagttyggaggygggygyggttggtagtttagagggttygggyggaggtttgagagtagggttggaggggyggaggatyggggagattygttygyggygttttyggtyggttttgagtaggygtygtggtagygttygygttttttgttygtttttygtygtygttaggaygtaggttygygttagggttggyggtagggttygtagttgtyggtttggygtttttatttygygtagtyggtttygtttagttttttygygtttgattggtyggattttgtttttggyggaggtaattgttygyggattttttatttygygattttggttttttygtaagtttttyggattygggygttttyggtttttttttatttatttttttgtygggtaggttygygatttttygtttttygggtygtttttygtygtattyggttttggtatatttttattatttagttygggttygttttygttttgggtttattttagttttttagygtygtttgttgayggagygygggagttttaaggggtyggggttattyggtyggygtgggtggtgttaggttygggttatatttyggtatyggattygagttttttagtttttygagtaggattyggaggaatagaaygttaatttttttygt

SEQ ID NO: 11363 - DNA, 311 bp, synthetic construct
  misc_feature 1..311: note = Description of Artificial Sequence: Synthetic polynucleotide
  source 1..311: mol_type = other DNA
yggttaayggtattayggaagtattagttggtatagaggttyggtgtaattatygttttgtatygtaaaaygggtttaggaagtttttaggagatattagyggtgttagaatygagaaagtgaygatatagataatttatggatttygygtaygggaaaygtttygttgggygttaagaayggtgtagtaattgaaaaatygtttagtgggygttattggtaaaagygttgttgtaaaatygttagtttygtattagaagtagagtygttagatagaattygggatttgaaattatygaagyggagatyga

SEQ ID NO: 11364 - DNA, 1048 bp, synthetic construct
  misc_feature 1..1048: note = Description of Artificial Sequence: Synthetic polynucleotide
  source 1..1048: mol_type = other DNA
ygttttygtaaatttttygggttttaygttttgyggttattaygtttgatagagaaataattagtattagyggttgattyggttgttygggttttygtgtaggygggygggagyggataggttttggtaygtatgygttyggggygggattgygttttaggtttgygygttgtygttagattagygggggggyggggyggyggyggataygygttttaggyggtagtygygygagagggattttgtgtttygttgatttttttyggggygttttttttygtgtygttttttttttttttygtygygtttttgygaggygttttttattyggtgggatygattyggggggatggagggggtaygtttttataatttttttgggatttygaagagaygttygygtgygatttgagaygtygttttygtygagggtttatgggygygtttttataggygggtagtggaygtgagggyggygagyggyggggtygyggygtttaggagggtygygttygggttyggtttygygtaggtygygygygygygttttygtygtygttygggtygygttygtttygtttttaggygtyggtttyggagttyggttygygagtagyggyggttgtyggagggaygatgagttgygyggggygggygggttttgttyggttygtygygttygttttgttgatttgtagtttgtggtyggtaygggtagataaygygagttaggagtattatayggygtttattaaygtgayggtgtaggagttyggtygyggygtttygtttaygtttygtatygatygygggygttaygggtttgatttttttaaggtygaggttygyggttaggtgttggygtygttgtttttttayggaggtgagtgtyggttygggggyggygggyggtggtygttgtatttygygtaggyggygggattagggttttyggtttyggttttggttttggttttttygygttgttyggtygatagttttagttagggtygaggttttygtygtggatagttyggtttgttttygt

SEQ ID NO: 11365 - DNA, 301 bp, synthetic construct
  misc_feature 1..301: note = Description of Artificial Sequence: Synthetic polynucleotide
  source 1..301: mol_type = other DNA
ygggaagtagtaggygtayggtygtttggatttttttggaggtgatggtygagygtttgttgtaatgygttaggygggaagtttygtyggygatgygttygaagatgtygttgataaaggaatttatgatttttatggttttagaggagatgtyggtgtyggggtggatttgttttagtattttgtataygtatayggagtagttttttttgyggttgygtttgygttttttgtygttttttttttgygttttggttayggtttttttggagttttttttyggggygggagyggatttygt

SEQ ID NO: 11366 - DNA, 1395 bp, synthetic construct
  misc_feature 1..1395: note = Description of Artificial Sequence: Synthetic polynucleotide
  source 1..1395: mol_type = other DNA
yggttttgtgaggtttaygygggagygyggaggtttttgggttttagggygtyggtagatggtttgtagygtatygttyggttttygygttggttaygttygttagygttatttttttttttygttttttatttttaaaaattyggyggtygagtagtttygtatttyggagggttttyggtgtaaaattgagtgggaaagagaaaggggyggagagygaygagagagggaaggtggggaagaagagttyggtygttttyggtttttttyggygagttttgagtttttagggtttattygtttttttaagtygaattatagaaattttttattgttatgttaatgaygagaggggttgtggggagagggtttygaagatttttttggaagaagggaagtttttttttttgttttygttttttttaygtttattygagttttttttagttagttttttgygtttttttttttttatttygagtttgaagagtyggtggtttagtttygttttttattayggttttatgygttttttatagttttayggttttttagtttagttttagaatagaggaggtggtttgggaattyggggygyggtgttagtyggatttttygtttttyggttgggygygttgygggttgggtyggygtatttgyggttattyggygagttttggtttattgattttygtttygagagagtygggagtttttttttttttttatttttygttagtttattttttattgaayggtggggagggggygggagygggggaygttttttagtttttatttttyggaggtttggyggggygggtagyggagtygggygygygtagaaygtagtttttgttttttttygttttagtattttaaatyggtttttgtagtygtygtagtagttgtygtygtttaggttgtttgggggggygattgygygttatttagayggyggagygtyggggatttaaatgttattaaaayggtgatttattattgyggaagtyggtaaatttttgtaggaggtttagttattggttgatatygttaygtgttttttttttagygtttttygttttttygtttttttttttgygtattgtatatttatattatttttttttttyggttttatggaggaagtgagaaagttggtatagttaygtygggtttygtaggattaggttatttagtgatagatggataatgtaagaatgaatttttttttggaatattttatatttagtagtggygattyggggatttgtttagttygagtttatttttyggattataggattataattttttagtygtgygyggttagygttaatagttgyggyggygaygatygttttttagtgggtaggggggtgtagatyggttygt

SEQ ID NO: 11367 - DNA, 766 bp, synthetic construct
  misc_feature 1..766: note = Description of Artificial Sequence: Synthetic polynucleotide
  source 1..766: mol_type = other DNA
ygatttygttttatgtyggtygtatygtgttttttttaggttttattagtatttgggttgttatggtgagattaagatgggtttygtttataattaaygatgttatttygtagygagttaaagttattttttattttgggttygttaygygatttttgtyggttttygttttaygyggttttagtayggygttaaggtttygtttataaatyggtttygttttttygtgttygggttygtygtttattagaygtygtttyggygtagygagttgagggtaygtttatttttttttygggtttttagtttttaaggttttagtataatgttttaggaggaagattttaggttttttttttattygaygttgtttttgggygagtygaggtttygtttattygtyggttyggttttygtttttatttgaygttgtttttgtgtagygagtttaggttygygttygtagtygtgttattttyggagttygtttttttgtttaggttttggaagygttygygggtygttaagttaygttgygagttttgtttaggaaygtttagtygttygtygaagtttagtattttygyggyggygttataggtgaatagtatygggaagtagtygtggttttgygyggagggygggggttattggagygtygyggaggggaaatygaggtyggagggaaggttaggygggygtttggtygttygggaggtagatgttagtttaaggatatagaygggttatagygagggaggttyga

SEQ ID NO: 11368 - DNA, 691 bp, synthetic construct
  misc_feature 1..691: note = Description of Artificial Sequence: Synthetic polynucleotide
  source 1..691: mol_type = other DNA
yggygattagttttygtagaggyggggttygagtttttagttagagttttaataagtagtygaagaaygygggtagaggtttygatatggttaggagagtaygtygtygttygtaggtgttygggtttygtygagatygggaagaggtggygtygttagttttttttagatttaggggtggttygataggtttaatttygtttttygttttgttttttygttttttttttyggygaygttyggttygyggttggtyggttygtygygygtttygggaygagggygggaggygagygygttggtygtygygtatttattattgttaaygtygtygtygygttttttttattttatttttttttttttaggagaatttttagtttyggtttttttygtttyggygtttygttaygtgatttygggtygttttttataygtgatygtttttttttttttttttattttygtattygttttttttttagttttttgtttygttttgttggtygttaggtatttyggggagaggtygtttggaggyggggttttaggttttatttttyggagggtggagaggggygggtaaattaygtygagtgggyggggtttgaatagaggygggttygygggttttttttygtygttttttyggttatyggaygagyggtttygtgttyggtttttttatygt

SEQ ID NO: 11369 - DNA, 1024 bp, synthetic construct
  misc_feature 1..1024: note = Description of Artificial Sequence: Synthetic polynucleotide
  source 1..1024: mol_type = other DNA
ygygtatttattttgggttgtggagtttagttggtygtygttygtttyggttaygygttgyggttttaygggttygggagygagggtttygttygygtyggatatgggtygtttygtygagttygygtygygtygttgtygtttagttygtygttyggtagggygtayggaggaagggttgtgaggtgttgggtgtagggaattgattgtttttggyggaaaaatatataaaattaaaaaaaaaaatgtttttagagaagagtatattatttttgygggaygttttttttttttttattttttttttttaaattttatttyggggaagttttgatttgaaatttgygaagaaaattgttatagygtaagttgatagyggyggggttttaggggttygaggtggatttagyggggaggggttggaaagagagatygggtttgggagaatttyggggatggggattaaattttttttttttttygttyggagattattatttattttygtattttttygtagtygttttaagtttttttttttttttttttttttttttttgtttyggaaagttagygagttttyggtagyggtygtattttygtttyggtggtttgaygayggyggyggtygtttttgygygttttttygttttttttyggtttagtttagaygtygtagtggyggtaattgyggtagyggtggyggttttgatttygygtatttygttttttttttttagttagtttattttagtyggtttttttgygagggggttttttttttttttgtttttttttttttttttttatttttataattttgaaatatttttttttttgttgtttttttttattatattyggatygggaaggtttygaatttttggttagyggtttygatgttgggagyggygygattygggttyggtygygygatttttygygttttgygttgtttgggttaggaggttagagtyggtttgggttggttygggttttttattygggygttgygttttttygg

SEQ ID NO: 11370 - DNA, 1339 bp, synthetic construct
  misc_feature 1..1339: note = Description of Artificial Sequence: Synthetic polynucleotide
  source 1..1339: mol_type = other DNA
ygtygygggttttggygagtaggtgattayggatttttggtgtttgttgggygagayggtgaagtaatttttttttygttttttttttygtttagaaaggtgtaagattygttaaatygtgygttgtatagyggyggtyggagtagaygygggatggtygygygttttttgtatagtatagaggggtagtyggagagtttgggaaaggtaygagyggggaattagagtatagggtgyggattagaaagagtagayggttagtygggyggggaaggaagttgtygagttgtaggtgtggaaggggttgttttaggtttatttttggtagaygagggggyggggagtygygtyggggaygaggagattgyggatygggygygttttttgygtagtygttygttygygtgtttaagtttttygggaatggttttygtttaggggtttagttygtygtygttagtttygtagagtttgtagttgttggggttyggtagtygttagggggygggagttgygtygygaataatggtygygtttggtygygggttggygggaggyggagtggaggtagagtyggtgtygggygygygygtyggtygggygtgttggggygygggagyggttgygtaggygggggygygyggygygagygygggagggygyggygggagygtyggggaggygggyggaggygggyggaggyggggggyggggagttygaggggtggaagtyggyggyggtygagyggggttagttttttgtagtgtttgttaatgttggagtygtttgtaaagtgttttyggtaagaaggtaaatatttttatygggggygttygggagatttygattttygygtygtyggygaagaaggtagagggygttggggagttttgtagtttygtagtayggggaattyggagaaaagtagtttttttygyggttttttttttttygygtttttttttttatatygggttttyggggtagtagyggggaggggagatyggygggggagggaggatagggaggygaaggaattggggtggggggtgygtgtgtggtggagggggtgggaygatataggtgttttgaggggaggagtygggaggaaggygaggaggtygggttaagtgggggtgyggaggtyggggagataggaaygyggttgygggygygggaggttggggttttagggggtyggggtggtagyggtyggaagagaggayggygagtgtagttayggtgtggttgygagggagagggagygtttagagtagggtaggggagggyggttyggggagggtttgygggaaatgggtttgggggygttggaggygg

SEQ ID NO: 11371 - DNA, 2273 bp, synthetic construct
  misc_feature 1..2273: note = Description of Artificial Sequence: Synthetic polynucleotide
  source 1..2273: mol_type = other DNA
yggtttttagggatygaggggttygtagagtgatttattttattttygggaagttgtygggagtttygyggattygtygyggtttttagtttttatgtgtaggggtttyggggttggggtttggttagtgygaygtttygttygyggttatttatagttgttgaggaatagtagtatygygaagtygagygtggyggtggttagtaggattaggtaggygttgtagggtattatgaagtttygtattagtagggaggygttaggyggttgtygggtgtttygygttagyggtagyggaggtatggttyggggtttyggttttgygttttatttttagagygtgggggttttttayggggtgtttttgggtttttttagggttgttygttttattttgggatttttggggyggyggatagtagttgtgtttttagagtttatttagttatagttttgggggtgttaggtttyggttttagttttttaggtttatygtgggaggagggtagaattttttyggagtagaaattttaaatgtgggtttygaggtaggyggaggagggattgggagttygtagttatttttgttgtttatagttttttygggttggtygttagygttyggttttttyggagttttyggagtygygtaggtyggagaggyggtgygygyggtaggtgygygggggtygggygtygagggtttgttgttttygttttyggtagaggyggaagyggygataggagygggtaggtaggaggggyggtygygtygggagygagaagaaagygtygtttgyggaggtygygtygggtttygggttttttttagtttttttygttttygyggggttggggaggtgagtgaggggygaagaygtygyggagggagggygggagtagagataaaggaagtygtttttagggatttyggygttygyggggagttttagaggatygggyggatgyggaygggagagygtygtataaaagggaaygtygggtaggyggggtygggggtgtttggttggggttggggttggggttgggttyggggtygggagygttggggttggggttgggtygggattggggttggggtggttgaggttggggtygagggtgggtttgaaggtgttgggattgggggtgggattggggttgggtttgggggygttgaggttgaagttggggtygggggtgggattgggggygttggggttgggtygggggtgggattgaggttgygggygtttaattgggattgagtygagggtagyggtggggttgggtygggggagtaggggtygygtygggtagygtygygtgttggagyggaggygggtgyggtyggggtaggtygygggaggaggaagygtttggggagtaggagttgggtygggygggttygygtttygtattygygggggtgaatyggagtygtygtagggggttyggggggtygygtgygatygygtgtgygygtygtygtgygtgtgttygygagtgtttgygttygyggtttygttttggyggggygtaggtgggggagggttttaggtgyggygygagttggagggtggagtgaggtgagyggtttagaaatygtttygtttatttttttttggggattgatagtggtttttttagtygtyggygttttygattttygygyggggyggggttatgtaaatgagttttatgtaaattgyggyggggattttttgygggttygtggggttggaaygtttttaagaggtygtttygggaaygttygggttttgaygttattgyggttyggggyggggaatgggggtttgggtttatttgggatttttgaygygtagttyggygtttttatattygttttygtaggtygtttttttttttggtygttgtttagtygggggattygggggtaagggaggggttygttyggttyggtgtgtgtattattttttagagtttatgttaggttygattattttggaggttagaatttttyggygatygtattttagygttttygtatatttttggttattygtagtttttggaagggatttttgygtatttattattttgtttttttttttgtttttgtaatgatygattttattttttaagttttagttttaggaaagtaaggattyggygttagggygtttttgtttygttagttttttttagtatygyggattaagttatttgttatattyggttttatttattttgtagaygatagttgtyggtagttattagtgttatygygt

SEQ ID NO: 11372 - DNA, 5586 bp, synthetic construct
  misc_feature 1..5586: note = Description of Artificial Sequence: Synthetic polynucleotide
  source 1..5586: mol_type = other DNA
ygggtttagtttygtatayggattygttaggagtaggtggttagtaygygttgttggyggygtattaygtaggtgtaggtgtttttattgayggygttggygatgatgtttaggtgygtttygtttagggttaggtagtyggggtaggagaattttaggggtttttggtttttgtattagttgtaggggggyggggygttttttgtaggtatagtttttttygttgtttgtttygtatttttgttttaaggtygttygygggttgtttatttygaggatygttyggggygtttatttattatatttttttttttttgtggaggattttttggtygtagyggaaggttaygtttttgttttygggtattagtttggttttggttttggggggyggtggggtggtggttatygtggggaaggggaattttgtttygggtgggggaaagagtttygttagtgtttttttagtttygattatggttaaggtttagtttttaygtagttttgtttyggtttygtgggtattatygtagtagaagtygtagttgttggggtagagtttttttatgagtygtyggygagygtygtagaagttttttygygtttaggaygygtataygaatagtttgtygaggtattttgtygggagygtggggagtayggtttggtttaggatygttyggttttygttttttygttygataaagggatttatygtagagtyggtgtagtttttatagttygttttgggataaygttttttagtygygtagygtggygtttaggtgtatgagygttyggtygtgttgtgagtgtattaggtttagygygtggtygatttygtgggtygttaygtgtattaggttygtgagttataygtttgygggtttygggggttagygtttgggagtttygggtttagtttygtygttygtgggttagtttttygaggttyggtgtatttgttggagygtagtygyggagtygttttyggtygtagttayggaaagataagaatgttttgggtttaggyggtgagttyggtttttaggaatgtagttttagttttygttttagaggygtagggggatgggaaagggagtttagggttgtygggatgggggtttttaygggtttttttttttgtttgttagattttagtggtagttattatttyggaaggttttttttgtygtttgttttaaagttygatygyggtagtttattgtgttgtagaggagaggtttttaggaggttagtttggayggttattttttttttagttgtagygygtggggtttaggatttagtattygttgtygtygaagtggatgtygtygtgyggggggaagaaggygtgggttagttttttygtggggtygtygaagtagtggtgtagygyggagattaggtagttygtgtggttgatygggtagaagtttggggggagtayggggttgagaggtygggygygtagggtygggtyggggygggggygggygtttatttattyggaggtygttgggttgttygggggttatttygyggaagttgaagggggataygtygttttatatgyggaaggyggtagttagggttygtygygtttttygygggtttagtaggtttygygggaaggagaggattttgtagggagagtgagtttagygggygtyggtygygttttttttttyggggtttagttagggygtatttgtaggtgaggttgaagtggttttagygtagtttggttggagttagygtgtagyggygtttgyggggggttagtgggttygggattygggtgggggggatygtygagaggtttagygtagygaygtttttttttagggaagaaagygtgygtgggaggtatyggtgayggtttttaggattaaaaattgtygyggaaaatggattggaaggaaaygggggtgggggtgtttagggttgggagygggygtggygggttttgtttgtttgtggtttygggttttttaatttgagygttttgttgtaygtttttgggaaygyggtttagtggaggggaaggggttgaatagtagggygaggttttttattttttttaataattggatataggggygtttaatttttygatttygggaygtatattyggatttttaaatatttygtatatttygtataygttttgygggtttttygatagattagatttatagaygtgaggatttttttaattyggtatttggtttttttttygtygtttatttgygttgygttttaggtyggtatygtyggggtttttagtygggttagtagtattagygyggggaggaggtatagggygattagygyggttttaagttagyggygttygaygtttgttttyggggttttygaggggataygggtttygyggtttatggtagatttgttgtggggtttagggttgtatggggtagtaaggygygggggttygggtygtagagttttyggggaggattyggaggggaggtagtggttyggyggttygggttatagttyggtgtggtgggggggagggagayggggygggagagggggtaaggttgtttttgaagggaattagttggttygttygttggtygagttgtttgttgtttttagtygggggtatggggattygygtttygtgggttaggggtagaggtttgggtatggtttgttgggyggggttttyggaggggggagygaagagggttttaggtagttygggaagggtagygttagggttttygtttaggaaagggtagtagtgggggtttttaagtttttattgttgggtagtgagtgatttggtggttttttttttaaatggaatttttaaaaaatttttgagttttatatgagyggagtttttattttggtttaggtagttgagttgggtygtaggagaygygtygttygtttgatagtgttttygagagttgggaggggatggtyggatggggaygtggtagtgagtatggggyggtggagggggaggyggggagggggtgygtgggtaggtaagggtygyggagggtgttaggttgyggggyggagggagggaatttgttagggtttttyggggagtygggaaggggygggttttggttgygggaagtttygtggagggtagygygtgaggtggagggtgtgtggtttttaaattttyggttaggttttagtaaaggggagagggagaygggagggaygggaaayggagttaagygtygggtttggaggtttggatyggttttgattgggggygggggyggggagttyggagatttaaaggttygayggggyggtyggygtttaggygygagyggttttgggttgggatygagatygggtatyggygtttygyggggygggggtgggggattgggtagaggagtaggagatttygagttagatyggtttgtgtttgtttygttttttttygtttttygygtyggygtygggtttagggtgayggtagttyggttaayggggttagygttaagtagttggyggyggtygygggyggtttttggaaagygygagaggttgggtttggtygtygtatttgtttygatatygtttttygtttttttagttygttatttygtttgygtgygttyggtttttagattttgtttgggaygttttttaattaattttttgttgggaygggattttatagttttggggagtgtygggttttttggattagagygygagttttygyggtygtttttaggayggaagagygaggggggttygggggtagatataggagttttygtttygtyggattygggtttggggggygggaggyggtygtgttygygtttgaagggtgttttggttygaaggtygtagttygggygggagtttggattygagagtttggggygggyggggyggatttagggaagggtttttttttttygtttttaggttygttygygtgtttygaggggaggattttagaggygttyggttttttaggtagatagtagaggtaaygttygagaatttttttttttataaaatatagggygggggtaygygaaggtagttygggygyggyggayggygyggtttataygaagatttggatgyggtygyggatgggttggyggtagatggggtaggygttgagygyggagtygtagggggygtatgygtygtggtygtattggaataygaggyggatgtggttgtygatgtagatggggtaggtgatgygtttttttatttgtyggtagyggttttgtagtttttttattagttggygyggygggtygggggygggggyggygttygttattttagagtygtttgyggggtgggggaygggtgtgagttgggaggtygggtgggggaatgyggggagtagggagttgygggggggygaggttgggggyggggtgttatttgggaygggttgtgatttgtaaggggggttggyggggtgggtgatttggaggtagaggtggggttygggtgygggtaggaggtgagtygtggaaattaggtataaggtggtgtgygggttggagttagggttgtaggtgggttgtgagttgggtyggggtgtgatgggggggyggtgttttgggtgggttgtgatttggggtggggttatggagggagtgtgatttgggaggggtygtgaaatttagyggggttggggtgtgatgggggaggagggtgttattttgaggyggggttgtgggtygggtgtgatttggagtaggtggggttgggggttgggggttggggggtygggtgtgagttttgggagggyggggtgtaatttggggaagggttatgggyggaagtgtgggagggaaggggtgggggayggggattygygggttattagttgagtaggaggygtgttgggggygtagagttttatttatttgggygtagttttttgttgaygattatttggtatttgatgtatttttttattttgygygygtattttgygaagaggagagygyggttggttgyggttttattagtygggtttttttatttyggggttttttatttatttttatatayggtgyggtgttggtayggygagaatagtattagtagygttagttyggagtatattaggtatttagyggtttygggtttyggygyggygtttaygtgtaggttygttayggtgttgggggtttygagygtttgtttggggttyggggtygygttttygttygtttgtygttttttgtagggggaggaggyggtttgagaggggttyggaggtygtyggattttattttygtygtttayggatttatyggaagygttgggygtagttttgaagggttttgagtaygygattttyggyggttaggtttagygggtttygatygyggtggttggtgtagtttaygtyggygttttttagygttaggaagtaggygatygtygygtttatygttagtttygygttgtyggggaggttygaggtttgtagttgggyggtaggatagaygtyggtgagggygggygtyggggtaggttygagggaggygttttttggtatttggtagttttagtagtyggygt

SEQ ID NO: 11373 - DNA, 1264 bp, synthetic construct
  misc_feature 1..1264: note = Description of Artificial Sequence: Synthetic polynucleotide
  source 1..1264: mol_type = other DNA
ygygggtgaatygagygttttttygtttttttggtttgtagttagagatagtttttygtygttygatttygtattygttgaggagygtagggttgtgttygtatttygtttygtatttgtttgtttagggaaatygggagtttygygggtttygtygygggaaggaggyggtattgggttttaaaaattygtgttgaggagaagtygagygttttaatatattygtygtyggtygggtygggttttygygygtttygaygtygttttagtttygttygygygygttygataygttygttttygttttygttttgatatagatataygygygygttttygtattattttagaagtttattyggttygygygygtatttagataygygtggtttatattygtygtataygtttttygtataaataygygygttttttaygttttyggttattttagatatayggtttygggttttaygtaggttygggygtygatatattttygyggtatggataygygtgttttttatttatttttyggttaaaygtatttttttttgtagttttttatttttgttttttatatttattttttattttygttttagaaataygttttttatatygggttygtyggatttttatattttttattygygttagaaaygygygtattttygtggtttttttttgtygygygtaaataygttyggttygygtaygttttttyggtttggtttygtatattygygttagaaataygygtggtygygtattaygttttyggttygygagtaygygtgtttttaygtttyggtttygttttygtttygygygygttttygttggtygtygttttygatygtaygygtttttygtttagtttygygtygtygygtatttattyggatttgttgagttyggtttttgttygttaggtttgygtygagtygtygtttattggttttygygtttygttyggtttygttyggttyggtttagttyggtttygygttygtttagttttattygtygtagttggaaygattygyggggtttygggtatygyggttttttygttattgttygagtgygtygttyggattaatggyggggygyggyggtgagtttatyggattagatttygttttttaggtygygtggtttaatyggaggatgygaygttattyggagtygggtagaggttggtgyggggygyggagtygttyggygyggggattgygtyggaattgygttygagtygygt

SEQ ID NO: 11374 - DNA, 716 bp, synthetic construct
  misc_feature 1..716: note = Description of Artificial Sequence: Synthetic polynucleotide
  source 1..716: mol_type = other DNA
ygaygggygygtgaggtttagagaggagtagtttygggattygtttttttttttgtttgattttggttaggaaaaggggtttggagygttttygggtttyggaaaygygggatttttygtaggtagtygagtagggyggtygtyggggttatygttgggygtygtyggagttttaattygatttatgtgygggatttyggttttttgtgygggagttttygttttgygygtygggttttyggttttygttttygggttgggattyggtttttygtyggttttattgagttttygtttyggatttgtygatttttygatttyggggagagagattaagagattgggaygtaaagggygtgaggatygtattttttattygtaggtttttttaggggygtygygtygggggtttyggttggygatygagtaggtttyggtygagtattgtyggygttgttatttgtgtgtatyggggatagggayggagggaygygatttttatttattyggttygtttatttgggtygttygygtttyggyggtttygattygaygttygagttagyggagttyggagtygttgggtttttygtttttttygttygttygtttttttygttttttyggtttttttygtttygtygttttgygtygttttattataaaaggtgaggttyggggggagggggygygggattttygtttygyggaagygg

SEQ ID NO: 11375 - DNA, 619 bp, synthetic construct
  misc_feature 1..619: note = Description of Artificial Sequence: Synthetic polynucleotide
  source 1..619: mol_type = other DNA
yggtggatygtttgggygggtaaaygtttttttaygttggygggtaggatttgaattygggtttttagggttttgtaggtygttattgttttygttttttttttgttttyggtttttttygtttggtttgtygyggttygtygttttttttttttttttttttttygttygttttttgttttttgtttttttttttygtttttttttattttttgtttttygygatttttttttttttttygatttttyggygtygttttttttttttttttgttttygtagtttaaataygygatatttggagtaatagtagtygttyggyggtttgggttttattataggtyggtttttatygyggygtgtattatattattttattttaaagaattygtagagaaattygtttyggtygataatagaaagtaaaaatatagttgatttttattagggtttttttataggtttygygtgaggtaatgaaatatggaagyggtgagatatgtaatgttttattaagyggttttagttataayggygtgtatgttaattaygtttgtaggttatygttygttttyggttgtyggattatttagygygttttttttygagtttyggaygg

SEQ ID NO: 11376 - DNA, 293 bp, synthetic construct
  misc_feature 1..293: note = Description of Artificial Sequence: Synthetic polynucleotide
  source 1..293: mol_type = other DNA
ygttttayggggtaaatttygaggtttagtttygygtgggagtygtagyggggygggttygttttgggttgggygggtttttttagygtagygttgggggttgygggttttttagtagtyggagtagtattttgagtttyggttgttggagygttgggatttttggttgtygttttygtagtagtagtaattattatttygttgtyggyggygtttttttgggaagtagtagtaattggtggagttggagtygtagtagtttgagtygtygtagtagtttttgtyggagtygt

SEQ ID NO: 11377 - DNA, 2748 bp, synthetic construct
  misc_feature 1..2748: note = Description of Artificial Sequence: Synthetic polynucleotide
  source 1..2748: mol_type = other DNA
ygaatyggtttttttyggtttygtattttttagggtygttyggygagtttttgtatgttttttattygttaagttygttattyggtttygtttttttataygygtattggtaygtttttttttagtttttagygggygggtagtttgtygggtatttaggaagttygggtttttyggygtyggaggatttataatttagttatygtaataagttygygtagttaaagtagttygtttgggtattaggttttatygtttttgtttygtggttttaagagggttygtgttagttttygaggtatggtygtttggygttyggtatattttagatttatttttttttgagggtaggggtttttyggggagagaaagagtagtttyggggttygtttygggtttttttgtatagattttttaggtayggagaataatggaatagttttgygygttttttttattygagtaagttttgttttttttttttygtttgttyggtttttattagttatagggtaaaggtttttyggttaaataggagtttyggygttaaygtttagagttttygataygttttaaaagatttgygggtgtaggggttggggttagagtyggggttgaggtatyggatatgygtttagatgygtatagttggtagttygttygttttyggttttagaygttttttttagttagaatttttatatygyggggaaattygatttgygtttttattygggatttatagaggaagtggagttttagttgtgtttyggggttaattagtttttatatttgtttttttatatttgttttttagattygggttttygttggaygttttttttgtaatgygggatgtttttgttaagygtaggttatattataayggaggtttttattagttttaggttttgttatattgggattttggttttatttttgagagtttgtaatttttttattttttattttattgtttagttttatttygggtaggttagagtygagttygggttttygtttgtaatgtttttaagaaggtatatttgagttatgygtatttggaggtgggttagtttagtatatttgggygtaatgtttattatagtttgatygtgaataggagggtttttygggaaggygtaaggggagggggtttygttttttttatattttttttagtagttggttaggagaaagttaggggyggggyggggyggggyggtaggatttatttagtatttggttgaagagtagttgttttaggttttttagtayggttattattagttyggggtttattttgaggaaggygygttttttttggtttttggtagaggggataggtttagagtttttttgygttttggttttgttggagagtagttygtygttygatttgttattttygtttayggtygttttaggygttttgttgagyggtttgattttygtatagggttttygagggattyggttyggtttttttaggttgggygygagyggagttaggggggttttggygtygttygtygggttgtttttggtttggaagagygagtgtttygatttggatagygttttggatattagyggagttttayggtttttggattttattttgtttaagtttttgggygttttggttatatygtygttttattygggtttataaagttgtagttttttttyggagttygtgagaaaagagaggttggtgagtgatttttgtttgygtaggttggaggygggyggttygtyggggatayggttgtttaygttgtyggatttgaagatttttagtttagtygygttggttttggttatgtygtygtygtygtygggygttttggygygtttgggtagtatgtttttgtygttygtygttgtygtttttttgtyggygtttygyggttygttygygttttygtygtygtygtygttgtttagttttatttygggttgtaygtttttgaygttgttgtttagtattttgttygygaggagygtatggaygattygygygtttgtaggtayggggggagggggtagggggygggagygtaggaggaggaggygggggaggaggagggggagagagaggayggaagaaatygaggaagaaggggagagaagggggagagagygagggaggagggagagaggtaagtygagggygtaggggaaagaaaygygaggaaggaagtygggaaaaaggaaagagtagggaagtyggggagygatagggyggggtyggaggaaaaggggyggggyggyggggaaaatataaattaaaatttaaaaattagttaaaggaaggatggaagtttygyggttttttyggygtttagyggtgtttttgttttggtgttyggattttagttygyggtttgtttgtttgttagtttygtggatatygtattgtygggtagygtttyggtygtatttagttagttagttagttygagtygaggttgtaggttgtagtttygagtagaggaaggagggaaggggaaggyggggagtaaataggaggaggggagygagtgtgygtayggggagggaggtgggggagagatagtgtgtttatttttggttygggagggggaggtatttgygagyggagttttaggggyggatgagtggggggtagggggaaataaaggaaaagtagttttttttttagtttttygygtagaagyggggygggtttttggattttyggagggtayggggattttttgtygt

SEQ ID NO: 11378 - DNA, 433 bp, synthetic construct
  misc_feature 1..433: note = Description of Artificial Sequence: Synthetic polynucleotide
  source 1..433: mol_type = other DNA
ygggattgggygttagttagtagttygtaggattaggyggggataggygggtagtatttataggtaagtygttagggggtttaggtttttyggaayggyggatagttygagtttagagtagtyggtagatagtatgatgtygtttttttggtagtggtagggggtygggtaggyggtgggtttygggtygggttggggggygtygtyggtttttygggaagygtatagygyggygtaaagttatagygttyggagtttyggygggttgggtatttyggyggtygggttattggggtatttggyggtygggygyggaygtayggygygatggtygtagttgttttttttyggtttyggygggttgtatygtyggtggggatygttttaggggttttattgggyggyggyggyggyggtgggagygtygggaygg

SEQ ID NO: 11379 - DNA, 1376 bp, synthetic construct
  misc_feature 1..1376: note = Description of Artificial Sequence: Synthetic polynucleotide
  source 1..1376: mol_type = other DNA
ygygggatttttatttttgygaggtttttagagtttttttgggaggaggttttygttggaaygtgtttgggtgaggagagggagatyggtttttaggtagggayggttagggtgygygtattttagtttttgggttatttyggygggagtttgygttttttttaggygygatttttaggaaggtttygggtggtgatygtagattggagagtgagttgggttggggaaagagtgaggyggatygtttttaattttyggtaaagtgtgygttttygttttattatttaggggyggyggtttttgatgagtttatgggggyggggygttaggagtttygttygygagtttttttttygttttygygaagtagtagttyggaattygyggttagggattygygtaggtttttttttagttgaggggyggtygggtattygggtttygattygygattatygtatttattattattatagygggaattgttyggyggtttttagaagtttyggttyggtygtagaggtgggttttygagtatagaggtttygaaattyggttygtagtttttagttttaatgtyggggggygyggtggtttygggygattttttatttygtttttggagtttataggtggttttataatttygyggttygygttgygttygyggggtttagtaygttgtygygggatttgtttaaygtggagtgtgtgtttgttttttttygtttyggttttyggygtagtttttatttagaagaygaaattgaagaygaagagtaggtatttgatgtatttggtgtagttttttatttttatggyggygygggyggygggyggtttgyggggygygggtyggttttgggyggygggygggtyggygyggggtttggygggtggtyggtaagggggtttggygggtygaggggygggggygygaagaaaggggygygggggygygggggygygggggygygtggggygttgggygtyggaggtttggtaggatgygyggtggggtygtygtygtygtygtygttgygygttygttttttggtygggygygygtttygtttygtagtatttatagggygtygyggtttygtttttttataggtttygtttyggttagtttaygtttygttttyggtttygttttttgtygttagggygygtagtygaggggtatggggtygttgtatttatttttaatttggygygtttyggttaggattttagggtttaggtgtatygtgttgggygygggaggygtttttaagttgttgtygygtttygagtttttaagggggtggtagtagggtygygtttgaggataggtatgtagygtttgtttaggagtgtagtttyggtgtygg

SEQ ID NO: 11380 - DNA, 3393 bp, synthetic construct
  misc_feature 1..3393: note = Description of Artificial Sequence: Synthetic polynucleotide
  source 1..3393: mol_type = other DNA
ygtagyggaggygggaggagagtttttggygggtatttgtttttygygtttttygygygtttaaggttgggtttyggggtattttattygggtygtttygggtttagttttagtttagaatgattttatattttttatatttttaagttttagaaattatygttttgagaattttaaggaggatattttttttygggttttttgtagygtygagtttyggtaggttttttyggygttygtttgttgygagatttttttgtygtttygaggagtaygagattttagtygtttgtagattatttatatttgyggagggtggtagtaggggtttggttggtttgaaaygygtyggggaggygygygttgtattaaatttygtttttgtttttaagggtagattyggggtaaggggattaagattttygaygtatttagygttatggggatagttatggttaatattttgtttttgyggttaattttaaggttattaaaattttttattygtagagagygygtatagtagtgyggatattyggggattgttttaaggaaggttgagttttgggagygygtggatttygttttatygttyggygattggttygyggggttgggggyggagatygagttygygttgtataaatatttatgagtyggtagygyggygygagyggggttggagtygggaagttgggttaagggygttgttttygtygaggaggaggyggyggttgggygygggtygygttatttaggtgttygtttygtttttyggtttggatttgtttttgggtgtttagtaggaaggagattgtgtgtatttygttygattgyggtyggagygyggygttgatttttttaggyggygggggttygtttgtttyggyggyggayggaygaaggayggaygtyggagaaagagggyggyggtttgggtygaggygggtttttaatttyggyggyggyggyggyggtttggttttgggggygggtatgagttttygggggtygagtggtggtygttagggttgattyggygyggtaagyggttyggtttagttattttgattgygtatygyggttttagaggaaatttgyggygttttygttttttttgttyggyggagttatygtygttyggygyggyggggagaagtggtygggygygyggagaggaggygagygagygygggaygatgagtygaggttyggtygttttgygtygygagggttgagygygattyggggttagtagagyggatttayggattgtggygygygtttgtagtygtttttaaattttyggagyggyggaaaggagtgyggaagggttttgtttaggttgygggtygygtygttgyggaygygtttttagaaggggttagattatyggtagatttttttttygggygaagtataagggagattttagattattygttgtattygtttgyggttttttygtgggtttttttttyggtatttttttgygygtygtttggagggygagggtatygggtygaggygtatagtatggagtggggttatttgttggaagtgatttygttgttggtygttttggygttgttgtagygttttagyggygttgyggtygtttyggttaaggagttggtatgttaagagattatygtgtygttgtgtaagggtatyggttataattatatttatatgtttaattagtttaattaygataygtaagaygaggygggtttggaggtgtattagttttggtygttggtggagatttagtgttygttygattttaagttttttttgtgtagtatgtataygtttatttgtttagaggattataagaagtygttgtygttttgtygttyggtgtgygagygygttaaggtyggttgygygtygtttatgygttagtayggtttygtttggttygatygtatgygttgygatyggttgttygagtaaggtaattttgataygttgtgtatggattataatygtatygatttaattatygtygygtttagttygtygygtygtttgtygtygtygtygttyggygagtagtygttttygggtagyggttayggtygttygtygggggttaggttttygtattgyggyggyggtaggggyggtggyggyggggaygyggyggygtttttagttygyggyggyggyggtggygggaaggygyggttttttggyggyggygyggttttttgygagttygggtgttagtgtygygygtttatggtgagygtgtttagygagygttattygttttataatygygttaagataggttagatygttaattgygygttgttttgttataattttttttttagttaggaygagygygtttttatygttttttggatyggtttgtggtyggtgttttgtttygtgtttattttygttatygtttttattttttttatygatatggagygttttaagtattyggagyggtttattatttttttttyggtttgttattttttygtgtyggtgggttatttagtgygtttggtggygggttaygagaaggtggygtgtagyggtggygygtygggygyggggggygttgggggygygggyggygyggyggygggygygggygyggygggygygggygygggyggttygggygggygyggygagtaygaggagttgggygyggtggagtagtaygtgygttaygagattatyggtttygygttgtgtatygtggtttttttgttggtttattttttyggtatggttagttttatttggtgggtgattttgtygtttatatggtttttggyggtyggtatgaagtggggtaaygaagttatygtyggttattygtagtatttttatttggtygygtggtttgtgtttagygttaagtttatygyggtgttggygtttagttyggtggayggygattyggtggygggtatttgttaygtgggtaattagagtttggataatttgygyggtttygtgttggygtygttggttatttatttttttatyggtattatgtttttgttggtyggtttygtgtttttttttygtattygttyggttattaagtaataggayggttttattaagaygtataagttggagaagttgatgattygtttgggtttgtttatygtgttttatatygtgttygtygyggtggtggtygtttgttttttttaygagtagtataatygttygygttgggaggttaygtataattgttygtgtttgygggatttgtagttygattaggtaygtaggttygattaygtygtttttatgtttaagtattttatgtgtttagtggtgggtattatttygggygtgtgggtttggttyggtaagaygttggagttttggygttttttgtgtattygt

SEQ ID NO: 11381 - DNA, 1381 bp, synthetic construct
  misc_feature 1..1381: note = Description of Artificial Sequence: Synthetic polynucleotide
  source 1..1381: mol_type = other DNA
ygttttaaygtgttgttttggtattaggaygygtatggggaggtggagataaayggtgygtggggttygygtgggygygaggaggggtygttayggtttttttgagagtgygttgttgagttyggttttggaggygtgyggyggggaggggttagttttygggtgttttgtgyggttyggttggggttaaagttyggggygggtttgtttttgtgtaygtgggagatggttaggggtgttggggatttygagggttggtgtgaggtttygggagttatyggggtgattggtygtygttygtagaygggaagttttaygaygtttaygttttttatagygattgtttygaggatygtaagttygtgaattttattttaaagtygtagttggagyggygtyggggttataagttttttttggaygatygygattttttgtygygygttggtatttygggttttatttygtgtttygtttattyggagggttygtttygtttygttttatgtttygttttattyggggttttatttttattatygagtttygtttttattttygtttattygaggtttygttttaaaaattygtttatttygtaggtttygttttttttttagagttttgygttyggtatygtttttgagttttyggtttygttttttttygttttygtttttgygtygtygaygttygttttttygtagagtttttygtygattttttggtgaatttgagtygttgtygaygttttatygtggtgttttyggaygtttttttgagtygggtttggtgtagttatagttttyggtgggtttygygyggggttgggtgggttttagygtagtatttatttttttgayggtttygtttygtagggagggtttgtgtyggttgttggagtttattygtagatttatttttattattttygagggttagaggygygatttygygtattyggygtttygtttgttgygttagtatygttatttggtgattttgttgttttggaggttyggtttygtggtgyggagtaggygygggagggttyggggttagyggygggttagagatgggyggtgttygggttttaggttgggattttttygtggggagttttgyggtattaygttttgtgaatgggttttggggggaggtttygttgtttggggtttygatgyggggagtygtttttgaggttttyggagttayggaatagttgtygtagggygtggaattygtgggtagtygtaggtgtgtttttgggggttaggaygttaggggttttygaggtgtttatatttgtaaatygtttygatttggtttttagattttttttttygatttttggaaagaagtgtagttggygttgtygygg

SEQ ID NO: 11382 - DNA, 493 bp, synthetic construct
  misc_feature 1..493: note = Description of Artificial Sequence: Synthetic polynucleotide
  source 1..493: mol_type = other DNA
ygagttgtttttgggygygtttggggttgtatttgggttaygtgggygtygttgtgtagtyggtatttttyggttaatttygyggtttggagaaggggttttgtattygtygtygttgtttgttttygygyggttttygtttattgttttgyggttgttttgygggttgaaaagtttttttyggtgtagaatttygggtttagygatagtttgygtygagtgtgygtatttgtyggagattygttagttygtyggtygyggtgagtggtttttggagttattggtttagggygggttygygggatggggygggyggttyggggygtagtyggttaggtygttgttatggtaaygyggtggaaaaaygggtttttgggtatttygttgtyggtyggttggtaattttttagyggagggatygggtygagttygyggattttttygagtgttttttggggtttagtygttggtattttatttttttygggttygg

SEQ ID NO: 11383 - DNA, 922 bp, synthetic construct
  misc_feature 1..922: note = Description of Artificial Sequence: Synthetic polynucleotide
  source 1..922: mol_type = other DNA
ygtgttttttttygttatttggtayggttygtgttttygtygttgatttggtaggttgygygygtatatttyggtygggtgygggtyggyggggtatagyggtttttayggttygttttygttagttatttttyggttttttttttygttgttygygtgtttygggtyggtttagtatttttygagttaygtgttygygtttttyggyggggaggagygtagtygygggggygygtttyggtgatttygttttttagttttttttttttgagttygggagttyggttygygyggttaggtgygaggagattygggattttaygttygttygttttgtttagygttttagtttyggygtgygaggygtygtttttttttttgttttgygyggtgtatggaggggttygttyggatygtagtygtygttatygtagtygtygtygygygygygyggggggatgatttgggggtggtttttygagtyggttgtagygtaggaggtttggaggtttagttagtttygyggagaggtgygggggtgggggtttygtygtagggtyggagggaggggtggygygygggtattgggtttggggggttttggtttaggggaygggaggtttyggggaygggygggtyggygttttttggagggygtgggggtgtagggttgygtgyggggtttggatgttgatgtttgttyggyggggagtttyggygtttygygttttygggggttyggaggtatttygygggaggaggyggggtgaggtgttagtgataygaygaaatttttttttgaygatggttttygggggtaggtgagatgtygtagagyggggagttagggygttygygygtttttttaagggagtygggtttttggttttttttaatttttatttttgtagagygttygyga

SEQ ID NO: 11384 - DNA, 719 bp, synthetic construct
  misc_feature 1..719: note = Description of Artificial Sequence: Synthetic polynucleotide
  source 1..719: mol_type = other DNA
ygttygaggatgttggaggtgggggtygtygttttagttygggygtagggttgggggattgggggyggaaatttttygtagaattgtttygtttgtttattttaagggaayggagaggattyggtttttygygaaaatttggtttagggaaagggatttyggaaagtagtttygtagggttgtggtagttttatttygattygygttgygtttaygtgtagggttygatttttttygggaggygyggygtyggttggggttaggyggtygaggatttygyggtttttygtttygtttygtttygtgggttttygygtatygtygtygygtatttatttttaygggtggagyggggyggggtagtayggtttygygygtagtttygattygttaggygtatygatyggyggygtagygttggygygayggttygattyggtygggtttttgtttygggygygggttyggtttgggagygggygagttygtttgtaggggaggyggggattygggttygggttgggggyggggaaggggttggataygtttgygtatayggyggttygatttttaggagttttygggaggggtagaaagggyggggtggaggagggggaagggygggggtgatgtygygyggtygtaggtttgggatggtgttygygttttygagattyggatagaggtaagtaggggygtygtgggtgttagagaggygg

SEQ ID NO: 11385 - DNA, 958 bp, synthetic construct
  misc_feature 1..958: note = Description of Artificial Sequence: Synthetic polynucleotide
  source 1..958: mol_type = other DNA
yggtgtayggggttatatagtyggaaatttttgtyggtttygggttattttttttttgaaayggtttttttyggagttattttttggaggattttatttygttyggtgttygggtttygtatttattttttttttttyggttygtttttygtayggygtttattttgtttttygttttttygttttatygtygttttgtttatattgtttttygtgggygttttyggtygtttttttttttygggtttyggtttgggggtgtttagttygttyggygtyggtttaaggtygygygatttygtaygttttygagattygtttygtygttygtygttygggtygtatttatygygttygtaggatttgggggttttygttttgttygygtttyggtatygtygtygtygtygtygttagyggaaatagggggyggggtttgttygggaatggygagtttgyggggyggggyggttygggggyggagyggggaggggyggggyggagyggggaggggyggggyggagaaggatygtagggttgagyggggygttagygttagtgttyggtattgtttygggttgggttttttgygttagaggaaggggagttyggggayggggtayggggttygygaggtaygggtgttttttyggggtttyggaagttttttttttygtttygtygttygtatgttyggatyggtygttttttygaggtgttatgatttygttttttttttgyggygaaygggttttttttyggggtaggggyggggaggttygggtttggtagtgygtttttttgggttttgygtttatayggtatttaagggtttttttggtttaggtttyggttttttttttygygttaggttgtttggtttygttattttatttttatatttaygaattttttttttggtgtttygggyggattgtgygagatgttgatagygygg

SEQ ID NO: 11386 - DNA, 3843 bp, synthetic construct
  misc_feature 1..3843: note = Description of Artificial Sequence: Synthetic polynucleotide
  source 1..3843: mol_type = other DNA
ygygygtggttttyggagaggygtttattatttgygtggygttttttygygtyggagtgyggttttgtttttagygttagtgygtygygyggttygtyggtttygtaggattggttatygttttttatttatgtaatttgygtgtgygtgtgygtgtgtgtgtgtgtttttttttygttygttttttttttttgtgtgtaagagagygagggtgggggayggaggtaggtaggygagtaggtagggaggggaagaagagaagggaagttattaaatatatatatatatatatatatttatataygygygygtatatattygttttaattttttagaagtttygggattgtagttgttttatgtggggtagtagtgttggtagggaygtyggtygggagyggtygggagygggagtyggtygtgygygygyggttggaggttygttggggtttygtttttygygggagttattgttggtttygttggagttgagygtagagttyggatttgtttttttttgggygtttygttayggttygyggagtagaggagtygygtygtygagagagagaggagttatyggygyggygttttgtttttttgtygtygttttygtygttttttyggyggtagtagtttgtagttayggtaaggyggygtgattygttttayggaaaagygttttggggatygyggygaygtttygttagttttatygttttttgtattgttggttygggtagggttygggtagtttaygyggttgtygagggtttygggagatgtttgtttgtttttttggtttaggaggagggaggttagggygygggtggtygaagaggtaagttgttttggagtttggagtygtygtagttttyggagttygtygyggattggagtttgggagtaagggttgggggagggtagggaggtgggaagygggtgggagggaggyggygygttttaggttygtttgtttttttyggatttygtttttygtttyggttyggtygtttgtagtttttttgtagattagttygttttaggttttygtygggygttggaggagttygygaggyggygtygggttttagyggttgtagtttgttttgyggggtaagtgtyggttgtagtagtttygtaygggyggtggttggagtttagattttggagatgygattttagtttttygttttttgtaattygyggggygttygtttttttttatygggygttyggtygyggtattgatgttygtttaggagttaattgaggttgtagtygttagatggaygtttggagggttttygggtgtgagtgtgattgtatgattatttttatttttagtttygggaaatgtgttttgggttgaaatgtgattatygagttttttagttattttaattgttatttttaaatgyggtygttatattggaggagtagattggaaggtagtggggyggtgtgtgtgtgtgtgtgtgtgtgtgtgtgtggatatatataygtaatygaggaatatataattaattatttgggtgaagggyggggggtttatttagtgagttttttttggygggggggtygggygagttagttgttygttgttygttttttttttgtttgttttygtttaggygaggttggaaagtattggaaatttagttgygtggtttttaattttggaaattggtttygtttttagggtaaaatgttaaggygatttatgtattygygtttatgtggatgagtgtattattgtttagttgggtgtagagtttttaatagtatygygttaagtttttattygatttttaatttttttttattttttaatygtggagagagggtttatagaaatgtagttatttgtaaattatygaygtagtgaaaggggygtagggaggtagttagagttttgtttgaatttgtatattggtttggtgtttgtagtataygagattatttygttgttttgtagaaggyggtggtggggtaagttygggattttaatygtyggggtggggggtggggggaagagggtgtttatgtattgagttttgaggtygagtaaggagagagatttgttgagyggtatygygggtaattatataagttgtttyggtgattattyggaattgtgatgygagttttyggttttygaaagataagtttgaaagtttgtttgtttggggagtgtaagtatyggggygtttttatttyggtttgggtagttaggataygtttygtattayggygtttatttgtgygatgggygtygggtgttgatgttgttgtttttaaagaatyggttatygaggtagggattaagtgggggtattyggaattgatygtagaggaggagttagttagaattgaggttttattgggtttttagagttttaagttttttttyggaggtgttggaaggttttttagggaaygtygtttttagaaattgatttggtgttttggggagttttaaagtttttttttttygttttttttgggygtttttttttgttttttaagttttgtgttttttaygtgtttagaaatttgttygyggtgtttggttttttttggagatgtttaggtagtttagttatttaggtttaygttggygaggggttagagggagtagaaygttggttttgtygggttgttatttttatttatatttatttttggttttttgygttagttyggygttgatggggaygggatggggttggggtygggtatggttttygttttttygtttttygtttttgtagatagtagtttgtttttgttgygtttatttttttygtttygtygtttttttttagygtygtagtttgtgtattaygttgatgggttttgatagagaaattatagtaagagtatgtttttaaattttgattttygtttgtagggggataagttattttagttttgatatagtygtggggaaygttgaagtttgggatatattggttttgaatttttttttttttagttygtagttaggagatggtgatgtgtatgggtggggagtgttttgtttttgttatattttagygttttgaaatttttygtttttttttattgaaattttygatttgtttgaatttgttttttgttgtaaaataaattttttttttygtagatttgtggggtttttyggattttttgtygttgttatgatttttaataatgygattgaaaagttagtgttyggttggaaaaaaatttttaggtgttagtyggtygygttttgattttgttgaaggagtttttaattyggttgttagaggggttttggtttagtygtgggaatttaggaagaaggagggygtttyggaggyggttgggttagtttttygggtagggygggaattaggtygyggyggggatygtagagggggaggggaygggatttygyggtaatttgtttttyggygagtygggttygygtattttagttttttygttttagtttttygtggttygtttttttygtyggtttttagttgttttygtggtataggagtyggtygygattttttygygtttttygtyggagttygygggaygtygttaattttgggtttttyggtggtyggagtagyggtgygaattagyggggyggtygggtgggyggggtttgggygggaaattggagtygagaagatygygttttaggttaagttttagtygtaagygtygygyggtatagtgtagggtttyggtygygtttttttttygttttyggttyggtygygtttttgyggatttatagygygtttygggygttttgtagttgggtttttagygggggagtttttttygttaaagttayga

SEQ ID NO: 11387 - DNA, 384 bp, synthetic construct
  misc_feature 1..384: note = Description of Artificial Sequence: Synthetic polynucleotide
  source 1..384: mol_type = other DNA
yggttggtygggggaygtgttygygttgtttttttttyggtygttagggggygtaggaagaagttttggaggtttgtttygggatygygtattygtttttttttttygttagttttttttttattttygttgagtttygtttygtygtttgttttttgyggtattygttygtataygaatttagttygggaatygagttgygggagtgyggtttgtgtygtttyggttaggagtttgtygattgtagaygttttgygaatyggtaagatgtgttttttggggttgtttttttttttatygtttyggggttaagttattttatatgagtataataaygagttggtgaygggtagtagttatgagagttygtttttygattttygg

SEQ ID NO: 11388 - DNA, 1432 bp, synthetic construct
  misc_feature 1..1432: note = Description of Artificial Sequence: Synthetic polynucleotide
  source 1..1432: mol_type = other DNA
yggaygttagggggtgtttttagttttagygtagaatttygtttygtataatttatyggattagttaggtygtygaagggtattaggttttagttattaygaygtttygttygaygggtygtagttatgtaggagtggtagaggttgtttgaygaagttttttttgggggtygatgttttttttygggtgggaaggggygttgtyggtgagggttattttggygtyggtttgygtygttygaagtygggggggaggggaggttttygtttagtaggggttaygttygtttyggaygggggtygygygggygtttaggygaygtattttygtyggggttygtgatygttaygttyggygggyggygttgygttttttttyggggtttygtttaaggttgtagttyggttygygtygtttttagggygtttttttygttygygttgggagttyggyggtygyggtttttttygttagttttagttgtagtttgtttttgttgttttttttygttygttygttygttygyggtttgtagttttygggttygtttygaggtggagggattgtttttttygggggttgtaygtattygtagyggtttyggtttttygtyggatatatatyggtttttgtaggttgtaaagaatagyggygagaatgtatyggttttttttttttttgttttgagtttygggtgtggggggaggggaagtyggygaatagyggyggyggtagyggyggyggyggyggtagygggygaygtaagttyggatgtagtttygggggtttyggygttgagaaatagtygattttagtggygtaggayggataygaggayggttygggggattgtgtatygggtgtgygagttygtaagtygtagtaggggtygygygygttgggtttttaygygtttatggtttygggyggygygygggggttttyggggtygtagtttygygtygtttggygygygtyggygtttygtttggttttaggttygggtgtygygygtygygttttataggygtygggttyggttgttygtttttttyggtyggygygygtagttttttygyggagtagtyggttaggtagttttgttygttgtttygttttggttygattgataggygygagygtyggtagtagttttygygtttygtttttygttygtttttygyggtttagtttaattagyggyggttgagaggyggttattagggtgaygyggtatygygttttgygaggggyggagtygggggtygttaygygygtttttygyggtaaaatttaaaggtyggtagggyggttttttaatttttttttttaagtagggaygaggyggaatttgtttygygaggattgtaattttyggtatgttgygygtyggygtygggtggaggggtttygattgggggygtagggygt

SEQ ID NO: 11389 - DNA, 325 bp, synthetic construct
  misc_feature 1..325: note = Description of Artificial Sequence: Synthetic polynucleotide
  source 1..325: mol_type = other DNA
ygttgtygtygttgttttttyggtttttttgttattattttttaygttttgtagttttgttttttgtttaygggttgttaagtygyggtttggtyggtggtggtagtggyggagttagataaagttttygtttttttygttttagagttttttaggygttttaagtggygggaaggtygttagttttttaggtttygygttttttgtttggygtgggggtggggagtygygtttggttttaggagttttttggtttttgttaatttttygtttttgtatattgygtttattgtttgagatgygtygagayggttttygttgaygt

SEQ ID NO: 11390 - DNA, 1242 bp, synthetic construct
  misc_feature 1..1242: note = Description of Artificial Sequence: Synthetic polynucleotide
  source 1..1242: mol_type = other DNA
ygtttatagataaygttttttygtygttggygttggttygggatgyggtttygagatttttgtagtygygygttggtttaggggattttygtaggaygygggygggygtyggggtygggtygggtttgggtagagtgataggtttttagtygtgagttttataagtagatttatttataatatttyggataggagtttaggtygygtygttygygtygttygyggggattyggygtgaatttataygttttttttttatygtttygtygtttgttayggtttygagattyggttagttttttygggggtttttttygtygygtagtatttygttygtgagtagttttygtttgygtttttttttttttagggyggtygtttttattttyggtttttatttagyggggatttattagggygagggttgaagatttygygggaygtygygygtyggggatagygaygtatttatttttttagttatttgggaggttgtaggttygggtyggagttygaggtttaggggygygyggagtagttttggttaaggygtagggygyggggttgtatgggggtttagtttagygtgtatatygtgtattttttagygtagggtttygygttttttygtagttyggtaayggtygttattttagagtttygtttattaggagtttygtttagggtatygtttattygggtttygtttttatygyggttttygtygtggtttygttttygtttagagtttygtttttagygtatattgygttagtyggatttgttttgtagttgggttttttggaggtttttatttygyggttattgaagyggatgagtgtgaggttgattgggggtttggggatgggggatyggagattattaagaatatggttgtgttgggaaatttttttttagagtagagagggagggttttttttygtyggggtgttttttattttttagtttttttygygtgggttygtattttagttagaggggatayggyggttaggtttgygttgttgygtttgagtttaggtyggtagaggtygtagatttyggttttttagtyggtagggattygtaggtgygygtttttayggaygtttttyggggaagttygagttygttttttgtaggtygggaagtattygtttygagayggtygtattttygtagyggaagggygtttgtattatagttgtagtattagygygtgygaggyggggttagggtygg

SEQ ID NO: 11391 - DNA, 1460 bp, synthetic construct
  misc_feature 1..1460: note = Description of Artificial Sequence: Synthetic polynucleotide
  source 1..1460: mol_type = other DNA
ygygtttttgttttttttygatttagtygtaaatttygagttttagyggtygttttttttttttttygttttttttgatttaaggttttaaaagataaaygtgttatttttygtttygtttttggattttggtttygatygaatgtagtggggatygagaagygtaaggtttaggatttgttagaggggygygttaagggygtttttgtttygttaggatattatygtttgggtattttattttattttttygtagttttttttggggtygggyggggyggggyggggtaggggggtygggygyggtttaygygttttttygagtgygyggtgygggaygggygyggttgaygygttttygtyggtgtttgtgttttttygtaggttaggagggtattttgygttgttattyggatttggygggtagygagttgtagyggggtaygtttayggtygagtygtagygggaatagagyggygtaggtttgaggagtttgggygyggaygagyggttgyggttggtygagtttaaygygtagtatygygygygtttyggtttttttttygtgttygtygygygttttagygatyggayggyggtgtygygygagttggygygtyggttgttttgttygttygygtaggagttgygtattgttttgggygaggtgaagaagatyggtagtttgygtttggtygatttttttygygtagatttygttaagttgtagttgtygygygggttagggattygggaygtataatyggaygygygggggttayggttyggagttgtgygttttgggygggaggyggattygggtttggaatagygtttatataygtgtataaaggaagtggagaattgaggtaattataygagtaatgagtttttttgttygtttatttataygygtaygygttgttaaaatatttatattgtttagtgttttgtttyggatttatttagtttattgttttaattttttattttttttgyggttttygatattatyggtttttgtggattttaaagygtttatttagttttttttaatttttttttgttaagttygaattgtaaagtaaaayggayggaaaaggaattttttatgttatagyggtttgtttgtttttttttttttttattttatttgttgygttygatttttatatgtgagyggaagyggtgttttygtttttgggtattaggggagtagattgggagttaggaaagttaaaygttggtttyggttyggtttggggagtyggggaagtygtaggaaggaggyggtgggtygggaagagttttgygaagggaagagttaatygaagggttgggaaggygtttygtggggayggayggaatagttgtagttatygtttttaaaaggygggaggygtttagttaaagatttttttyggaggtyggttttgggggggtggttygattgtttygg

SEQ ID NO: 11392 - DNA, 1064 bp, synthetic construct
  misc_feature 1..1064: note = Description of Artificial Sequence: Synthetic polynucleotide
  source 1..1064: mol_type = other DNA
ygattggyggttgtgtggygatagygtaygtttagtttttggaaagttttgtagtttattaggagagttttyggggygtttttttttttggtttttttagggatttgygggtagtggaggagttttttatagygaggtagygygtttaagtyggataggatgtttaygyggtatttttttgtttygggttggaaggygaattttaggtttygygygtttagggtattgttggtttttagtagtttttttaygattagaggtaagtttygagttataatttttagttgggtgaagattatttttatttttagtattagtggtagtattattgttttttygggygygttatagygtagttgtagtyggaygyggtttygagaygggttgygygygtttaggtgagagtagygtatttygttagggttaaagtygtaygggaagygtttgggatttaggyggttyggtygttgggttagtgygtygttgtttagtatygaaatygygtagyggttttygggttgtatttgtaatattaggttatgtaggggatttagttagattttayggtygaaaggtattyggagttygyggttygttagtattatggtttttttagtagggatttttgtagttttygygagattaggggatagtaaygttttgtygaaggtagygggttgtgtygggaygyggtttattagtgataggagaagtagtagtagtagtagtagtyggggyggyggtggyggttttggttgaaagttggtggagttgtttgttyggygygaggataattygggagtttyggttgagtgtatggtttyggtgttygggtttggataggttagtttgagagtatgygaagtyggttttygggtagataataagagatatygtygggaagtgttaggaatttygygygttgttygyggggtttttttgtagtyggggttgggttagaaggatggtaaagttgygyggygtygttygggttggagtygtagtygaggagtygaagtttttttaggtygtttagtttygtygttagygttttaatygygygg

SEQ ID NO: 11393 - DNA, 622 bp, synthetic construct
  misc_feature 1..622: note = Description of Artificial Sequence: Synthetic polynucleotide
  source 1..622: mol_type = other DNA
yggtttgttaygygttttygtyggggtttattygtatttgggtyggggttggtgtttaygygygayggttygggagtayggatttttgtttttygtagtatygtttttygggtggagtyggyggtttygtttygtagagttggggttgtatttggggtaayggggtygggtttggaygttaggtyggaggagtagtatttgttaggagtaygtttygtyggtaggtygtaggagttttgggagtygtygttatgggtaygttyggygggtggggggtyggtygggttaaagattyggagttaygyggggygggggtyggtatygagggtygggaggygygaagggtaygyggyggygggaagyggggygattygaaggtttaygggggtygggaggttgyggggygttygggattttttttygggtggttatygtgyggtyggggygyggaagttagaggtgtttagaggygtygatttygtygaggttgygattttggttygttygttygtggggtattgtaattttygtatttttattttgygggtygggagtgygtttggagygggaygggatttagygggtgayggtaggggyggtagaaatatygtttaattggygg

SEQ ID NO: 11394 - DNA, 1622 bp, synthetic construct
  misc_feature 1..1622: note = Description of Artificial Sequence: Synthetic polynucleotide
  source 1..1622: mol_type = other DNA
yggttttatygggttgtaagggtygggaagttgtgtygggggygttttagaggttagagttagggagggggttygygatataggygggttttttaggygggtttagggttaggatagygyggtattattyggttagttttttgtagttaggatgaaggtyggggatagaygtttagttttagattttttagatagggttgggtagtgtyggtgggtgtttgggagaggyggaggygggygtatttttagtattaggttygggaaggatayggtgtttagtygttggagtttttggtttgygtgttttattttgattttttggtatttggtgaayggttttttygtagggtgggggtagttaggggatttgtygaggaaagttggggatagygggtttggtggygyggttyggygyggygygtgtttggggygygtggtyggttatagaattyggggagggtggaggttttygggtaygygtyggggtggtgggtagttygggayggtagyggygattygttatttgaggaggggyggggattttatygyggttaggtygaggygtygagggttttttgyggttttygttttttttygttggtttygaygtygygttygggtygggattygagtttyggtttygyggggtaggtttaggtttgygygttgygtttgtagtygaggtagaaattygtttygaggygygggygtygggttygggttttaaggatgygygtygggttttttttygyggggatagtygagtttygtyggygttttaggtgttttygtagtgygttygggygyggaygtttttttgttttyggaggggaagygggagggtttttggggtaaygtttygatttygggttttttaatttgggtygatagtyggttggtatagggaggtttgygygggagaggggyggagagagygtagygyggggtatagygggyggttttygtgtygygygygygattggaaayggygtgtagattttaaaaygagggttttatagagggttaygaggggtaggagagagttttyggagaattttagtttttygatayggttattttttggtaaaygagygagaattggggygtagagttttgggagggtygttttttyggygggagyggttygagtatagttttatagtagatgygagygyggygggygttttggtgaygaagtagygggatttgtaggaggtagaggtttggtggggtygtggaygttaygtygagttgtttagatttttttagaagatagtggggattatttaayggtttttagtagaaattaagttaggtgttygttttayggagattgttyggttgtagggtggaggttggatgagaataggygtttttttaggtaggygttygtggtggtaaygttgtttaggaggagggtaygggtttygggaagatttgygaggttaaatyggtagtttyggagaattgagygtaagaggtyggtgatatagagaggagttygggaggtygtatgttttaggttgaagttatttggyggggaygtttattgagatgygaaatataggaagggatagaggttgygtagagggaaaaggygatggattyggttttggaaaygt

SEQ ID NO: 11395 - DNA, 324 bp, synthetic construct
  misc_feature 1..324: note = Description of Artificial Sequence: Synthetic polynucleotide
  source 1..324: mol_type = other DNA
ygatttttygagggaggagatagygtygtttttttatttgtataggtgttttygtygtaggtttygtatatttatttatggtatttatataggggttygaagaatatgttyggtttagttaygtggtagatgtagaygtygtagtygtagyggtttyggtygtggtatagygyggttttygggggttgtttaggtgygyggtagygtygtttygattyggttygggatagtttgtaggyggygttyggttagtttttgygygggygataagtaatyggtaggtygggttagaygyggaygtygttttttgtttygaatttaygt

SEQ ID NO: 11396 - DNA, 1881 bp, synthetic construct
  misc_feature 1..1881: note = Description of Artificial Sequence: Synthetic polynucleotide
  source 1..1881: mol_type = other DNA
ygtattyggtttygaagaaggygtttttyggataaaatygaggaatttgttttgttttgtaaggaattagggtttgttgatttttagattttaaygagaatttttgtttttygtaggygttttataaatttttattggataattttatygygygttattgggttttygggagattygtgatttttattygttttgggygygggttygtagagttttaattygygttttyggtagtygggatttttygttyggatyggtttttaggttggaaatattatggttygtattyggggygtagtygagatttatygygtyggaggtttygggattygtttagatygttgtttggttattttaygtttttgagttttttatatagttagtttygtgattttygagtttygtgattttygagtttygtgatttttaagtttyggaagtygttgtaggtagyggtttagttaggtttygttttttttatyggagttttaygygttaattttagttaggtttygttttyggtygttttaggygtggatttaagttaggtttygttttttgtttggttattttaggygtttatygttttaggygttttttagtttaagtttaatgttyggttgttttagaygtygatagttttatgtttygttttttaatyggttgttgttggygttttttggtttaggtttygttttttattyggttgttttaggtattttttaggttagatttygttatttatyggtygttttaggygttygtagttttaagtttygtttttygttyggttgttttaggyggttttyggtttaagtttygttttttgttyggyggttttagaggttygyggttttaggtttygatttttgttyggttgtataaggygttttttgggttaggtttygtttttagttyggtygttttaggtttygtttygttttttttgtgygygtttygttyggtagtttgtgggaygygatygyggygttagtttygtttttttgtgttgyggyggyggtttttygagtttttttygaygygttttttaggttagygagtttygygtttttyggtgayggattatgtyggyggygggagygggygygggygtagaggygggtttttttagygaggagttgttttygtttygtttttygttgtatygygtttgtygygayggggatttggttaygttttgttygttgttgtagtagatattttaygtttatttggtttttgaggattttttttatggttggaygttygtgtattgggtygygtatttyggtaaggtgggtgygaaygttttaaggygttatttttttyggttgtttagtgggagtyggggaaagygggtttgaggtgygggggaygtggggygtgtygggatygyggggyggaagygggatygayggygtttgtgtttygaggggtttagggygtttgtgyggtagygttygyggttyggagtygyggyggggtagtyggggggygyggggyggaagygaggtyggtggygtttgygttyggaggggtttagggygtatgtgyggyggygygygtagtaagtttttaataaggygggttttaagggtttyggygtttgttggtyggattttgtgygagygygygygygygyggatggtgyggggttttttaggtygggtyggaggygygagygatttygtagagtygggtattaggtygygaagtygtttaggyggttttyggggagtygagttggggttagaggygygyggggaatgttygggygyggtygattttttggtttygtatagtttygttagtagtygagggtygygttgyggaygagtttagtygaggagtaagygtttyggygggattggaaggtttygg

SEQ ID NO: 11397 - DNA, 944 bp, synthetic construct
  misc_feature 1..944: note = Description of Artificial Sequence: Synthetic polynucleotide
  source 1..944: mol_type = other DNA
ygtttatagggygtygyggyggygttgtagagtttatagtagttygtgtygtygtttygttygttagygttttagygaggaagtagygygtagttygyggtttagygtattygtagtagygttygtagttygttygygttatgttttaggyggtygagygtttttaggagtgggttatggagggttttygygaygggttgaagaaggagyggttattggaygatygttaygatagyggtttggattttatgaaagaygaggagtaygagtagatggttaaggagttgtaggagattygtttygagtygtaggaggtgtygygyggttyggagttttggaagtagtagtttatygaggayggggattygtaagtggyggaggttyggggttgggggtygtygggagggygggaygygygyggtttgggggtgggaggygtygggtttggagttygagtygggggattagygatgtagtygggygggygtygyggtatttyggggtttttgtatygtttygaaygttgtagggttgtagggtygygyggggtatyggtttaattyggaggggyggyggttgggttttggtggatggtagygtygttataygttttttttttttagattygttttttaggtygggggyggggyggtagyggggaygygaagttttyggttgtataaggyggggygggagtttttggtygttggygggygtygagtagtygggaggggaagtatagggygtttygagttggygggagggyggggyggtttggtyggygttygtyggggtygyggggggaggggggyggaaagtttttgggygtttgttaggaatatttagtttataataatttygyggaaaatatygyggtttyggtttttagaaatttyggttttgygtaatttttygtagttygygtttttttgggttttaygygg

SEQ ID NO: 11398 - DNA, 1514 bp, synthetic construct
  misc_feature 1..1514: note = Description of Artificial Sequence: Synthetic polynucleotide
  source 1..1514: mol_type = other DNA
yggagtygaattyggtgtttttgttygtttggggtttygttagygygtygtaagtttttttagaaatttaaattttgtaggtygtatttttaattygtattttatttaggttttygtttggygtygatttgttttagtttaattttyggtttygtagattaggtatttttygggaygyggggtagattttgygttygggttttttttygtagtygggttgttyggtttttgygygygtataataggyggtayggygtagttttygggagygygggattygggtgttagtttyggygtttagttatagygatatagatttgggtgtyggggttygttagggagttttgtgattyggggattttygygatgtagagaattagggatygygtayggagtttaggygygtagtttgtagttaggattagtttttygttttygtygttgaagtygtttygagttttaygtttttttygttgtygggttyggttgttttagggtttygttygttygttttagagtgagygattttygatttayggagaagygattttattatyggtgttygatatttagagttaagggagygagaagaaggygaagaaagaggyggagagyggtgtattgttttygttgggattygygatttttagaaattttttygaaatttagtttygtygtygtttygtyggtagggggtatagygggygttyggggygyggyggttgagygatggggygagyggaaagggtttagaygtttggtttttgtttatatttyggagaaagttttgagtattaggygttgggttttttggttatttttttgattttttttatyggygtygagtttgttttattttttttagttttttggtttygttagttagaggggygtttygygttygtttygttttttatttaygtttttygattygattygttttttygaattttygttttttgagatttygttttygattygttttaattggtygyggyggtagtygagtygygggagttgygygttgagttygyggtagtayggggagygttygttygtttygttttggatttaattaagygtttygyggaggggtgyggttatttgggggtaggagaaagyggagtaygttatttttttagggatttaggaagygaggygagttttaggtggaygyggtggtgtggattayggygattagggtttttttttttgttgtggagayggaggtgygaggggaygtyggyggttttttattttttggtygagtggtttttttygttttyggttggattttttyggggygttttttttagagtygagtygggttggtygggggyggttgtttggtttgagtgtygttttattaaagyggaaygtyggaggggaggttatttygagagaaggyggttttyggyggaggtggtttygtgaattttgtagttttttgttygttygttattygagaygtygygtttygtgggttttaygttggatggagggggygtygtyga

SEQ ID NO: 11399 - DNA, 2144 bp, synthetic construct
  misc_feature 1..2144: note = Description of Artificial Sequence: Synthetic polynucleotide
  source 1..2144: mol_type = other DNA
ygygtttggatgygtttttyggattyggttttatataagttttagtttttyggattttgtatttttttygyggatttttttatttttttatttttaggtttagatttttttttgtyggaatygttaygtttttttatttttttattttygttttattyggtttttttttttttggtttttattyggttaggttgtttygttttggtagttttygagggtygttygaggttttygtttattaatygttttygtttggaagaatgygttygttygagygtattttyggygggtgttaaagtttttygttttaataggtgtttttgtttggttaygtatagttttgttatttggggttyggayggagayggygataggatygttttttgtagggyggttgyggtttygtaygttttygttygggtttttagagygttaagggttttygtagtttygtygtygttttygttgtgttatattgtttttgtttttttgttygtttagatgtygygaggttgattttatgtaagggtatygttaagttygggygttgatattgtttatttattygtggtggyggattttaaggttgggagtgagagaygygtatagtgygagatttttttttaatttagagaatttyggggaagttgggtgttygygtygaagaagygggtttaagttgattyggtttagaagggggttygaagttaggygtagygtttagagagtttttttttatttaygtttttattygatgttttttgtttttagaaggttggagaggggttgygtattgttatttaygygttyggttgygagtggtttttatygttygttygtygygygttgggttyggtagtttttyggggtataygaggttttygtagtttttagattttyggtttyggtagygtagagtygggagagtygttaygtttttagtygygygygtaygtygggtttattaaatttgtagtatttttttttagtttttattttttgttatttttttttagtyggtgygttttagtttygtygttyggtagaggttgttataataaygggtaggaatgttttaatatatataaagtyggttyggygtagygggtatttagttttggtygggtttygygttttyggtygtygygtagggtttggaygygygtygyggttttttagtyggtyggtygaygttyggggygtatttataatgagygggatggtgyggttttygyggagttgtttygattttttgtttgttttttgygygtttyggtygtyggaggatgttgygtgggttyggttgttttgttataagtagtagaaagtgtttaggatttaggttayggttaggatggygatggtattggygyggattttttttatggtgggtagaygggygttttaggtgggggattgggtyggygtgttttyggggtyggggygggggygttygtagttttagttgtttgttttygttygygtttagttgtttagttttgtagagtagaaaaaggagagaggtgggggggygggggggtgatagggagagataggatygyggagygatttttayggttttaatgttttttagtttygagygygygygtttttygggygtttatttattygtgygtagggtyggtttygygttttagtygtygtyggttgatttattaggttattgygtattgggagagaagygygtygagtgggaagyggygygggtttttttttygygttygggaattyggygagatagaygttygyggyggaatggygattggttaaagttagtttyggtttttatygttaggtgatygaaygttyggtagttgttttygygyggttttggtyggttttgtygatttatatttattttyggatygagyggttttgagttatygattggagaygygygattttygatttgggttygygtygygagttgtagtttygggttgygttttggygygggatttaaggtgtgttyggygagtttttgtgtaggggyggttgggygggggagagttttgagtttgtattggaatttgtagttgagattagttagatygggttygtttagaggagggattggaagttggtgtatttgatattygaagagygygaaggggaaaygaygt

SEQ ID NO: 11400 - DNA, 379 bp, synthetic construct
  misc_feature 1..379: note = Description of Artificial Sequence: Synthetic polynucleotide
  source 1..379: mol_type = other DNA
yggtgygggttygtttttttttagtttagtttttttgatatygttttttttttggggaygttgtttgygggttygygygttttygttttygatttttttgtaggttttttygggggtyggggtaggatygtatttatygaggattygggygttggagttagtagtagyggtaygagtaggagtagtygtattttagtttgygggagaygtattgggttagagyggttyggggttttygtagttgttttgggygygggygagagtgtgtgggygygtttttttttatggtttataggtgattaggagattygtaataggatagtygggtgygtttyggtgtatygtagagaatatagygtgagggygtttygtygggygg

SEQ ID NO: 11401 - DNA, 637 bp, synthetic construct
  misc_feature 1..637: note = Description of Artificial Sequence: Synthetic polynucleotide
  source 1..637: mol_type = other DNA
ygtygttttatttttaataagtygaagtttttgaaggaggttyggtgttatttyggtgtgatygygtttyggygaygttgggtagggtgtagggagttagttyggtygyggtttagygggaggggagggggtyggtttygaattygggygttygggtygygggtgatttattgggaaygttaggttygygygtttagatyggygggygaygtttagygygttttaygtttttygttygggtygttygygtagaagtagttttygygtatttttgtttttygagayggattygtygggaaggagtttggagtygggyggtyggygggtagtaatttttttttttttagttattatggtyggtgygattttttattygygttygtagayggattttttggaaagtatygggttgggtttatttgattggygttygtaggggtygtygatttttttatagatttayggaaattgtyggtygtaagtygaggttyggtttttagtattygtyggttygttygygtyggttttttaaagagttgttagatttattygttagtagtttttttattygatygttttgtaggtgyggtgggtttttttttygttttygaygygygtgygtattttygtgtygygg

SEQ ID NO: 11402 - DNA, 959 bp, synthetic construct
  misc_feature 1..959: note = Description of Artificial Sequence: Synthetic polynucleotide
  source 1..959: mol_type = other DNA
ygggagtggggygggtaggaaygagggtttgagtttaggatygtaattttygtgaggggttygaggattttagtttaaygtttygtygggtttygtttttatttttttttttatggygagttygtygaggtttygtygtttygttattygtttttagygtygygygggttttgttatygygtttaygttyggttaggyggygatttttygygttttgtttygtyggttgtygggggtttaagaaatttygggggggyggggtygggggyggggtgaggttttygggggtyggggyggggtyggggagggggyggtggggtygggggttyggtttagggygggaaatgggtggggaggggyggggtttgggttggagattggayggaggagtygggyggagatgtaattggaggaagagggygggayggggyggagaaggtttttygtatyggyggagggagagggattaggagggggttgyggygggggaggagagggggttttyggtttagagattgaggygagggtggygggagyggygygtaggtagggttggggtggggygtatatagtgagygttgggggygttggyggtggagtttttgaggtttttygaattagtgggttggggttgygagatygagtygagttgttttgggyggttagagatgtgggtatatagaggttttttttttttttttttygaygtygggtagtgggyggtggtttggttttttttttggaatttttgggyggggtygggtttggagtttgggtttttgttyggagggtggtgttataggaagagttggagttgagagtygggatttyggggtttttttagggggyggttygtttttggtttttaggggtttttaagygtagtgtttttttgttttttttgggtatygtttaatttttttygtatttgagggtygattattttttygatttygygg

SEQ ID NO: 11403 - DNA, 826 bp, synthetic construct
  misc_feature 1..826: note = Description of Artificial Sequence: Synthetic polynucleotide
  source 1..826: mol_type = other DNA
ygtttatttttgyggygtygtgaaagaaggygtaggaggagggagttttgatattttttttygggttggggttttatagyggygaaaagayggagggagtgatygggggtygyggggattttttygggaygggttttygtyggaggagtttyggaaagtygttttttattttygaggtttygtttgygygggygttttattagyggtyggggtggtggyggyggyggyggyggyggyggyggygyggggyggggygtygygatttttgttttttttttgggtygagyggtaggygygttygtatygttttygttttttygtygtagtygttgtygatyggttggttgggttttgyggygtgaggatttyggyggygtygtagtttygygagttatggtttagttyggyggggaggttyggttygggtttaagayggyggtgtagattygygtygttatttaggaggtygaggaygtggaygagttggaggaygaggaggagggggyggagattyggggygtyggggattyggttyggtattttagtttyggttggggtagygygagygaggaggagtygagtygygggtataggtaggygyggyggttggttygggaggtgggtttygagggggygtygggtygygygygagttyggggygttgattgygygygataatttttygggtagagggggttgagttagtttygtygtyggggaagtagtttygggtygagtttttgagttagaatyggttygtggaggtagtyggtgttttagttygtagtttygtygtttaatygaggtttttagggttggyggtygg

SEQ ID NO: 11404 - DNA, 2156 bp, synthetic construct
  misc_feature 1..2156: note = Description of Artificial Sequence: Synthetic polynucleotide
  source 1..2156: mol_type = other DNA
ygttygaggaatyggtttaatygtttttygttgtagtyggtttgtttttttttyggaattatygagggagaggygygtgyggaggtyggygttyggatttygtattygttattgttgtyggygtattttttygaagttttatttygaagggttgggttttattygygygttttgtgygtgtttttttgtttttttaygttttttttgtttggttgttgygaggttttgtaggggaaagattggygyggggttygtattttgtttatgttataggaaaatygtgggagttttttygaygyggygtattttyggaagttttttttttaggagggttgygggaaggtygggattttgtatttagaygaattyggtygttttttaagaggaaagtyggagatttagttgaggggtaaaaatgttagggaaaggygagtttagagtttggtgatggagaaattgggaagttattttttattttttaattttaggatggggaattygtaattgaagtyggagttttagatttggggygtatttttagtttagtttaggaaagagatttaagggygtagtagtgtggatattttttatttyggtttygaaggtttagygagggtttaatttgggttttttgttaggttygtttttygtttttttttagttttyggttygtgygtygttgtttttttaagaagtttaggtaggtaggttyggttgttggagtygtttttatggtaattygygagttgyggyggttttatgaatatttyggggygygggagttygagygttgtyggagggygtttygggggaggyggtygttgatgtaagttyggygggtygttgggtttygttyggttgyggygggagtttygggaygggtyggaygggtyggggtagaggaggygaggygagttygygggtggttagttataaagttygggyggygagatagayggatagttagttttttygygggaygtaygttygggattygygygggtygtgygttttgtatttyggagyggttttttgagygtygyggtygtagagttttttyggtyggygtttattgtttttygygggggyggggygtttggagtygggyggygygtygygtttttgaaygttagagggagggagggaggtaagaagggagygyggggttttygygtttagtygggttygggaggaggtgtagygyggygagttyggggattyggagygggattaggatttttttygyggygygtagtttgtttaagtatgggygtttgaggttgtttttaygtyggyggtaaaggaygygtttttaygggyggattgatyggygggyggatttggagttygttygyggygtygygtttttgttttyggttyggttygatttyggtttttggygttatggataagttgtygtygtttatgygtaagyggttttatagtttttygtagtaggtgggggttaaggygtggattatggaygaggaagaggaygtygaggaggagggggtygggggtygttaagattttagtygtaggagtattyggttgyggttattgttttygttttttttttyggyggtygygggtggtayggagtttyggagttyggttttyggggtagyggatagygaagggtyggttygyggygygggtaagtttagtaygaayggygattgtaggygttttygygggagtttggtttygttgggtagtyggggyggyggtagyggyggtayggggagyggtagtagttayggatatttgtatgatttygyggaggagyggyggtttatygtygagggygaygygtttttyggygaggataggaygtttttaggtttggyggtygagttygagygtttyggygtttyggygtagttygtagtttygtygtygtygttttagtagttatygtagtyggttttygttttttgygagtagttttyggtggatatygttattaaagtggagggaggygyggttgtyggygattagattttttyggaggtygaggtgygtttgggttaggtyggttttatgtagygttagttyggggttatgttttaattyggggttaataaattttttttaaggatgttyggtagttagaaagtygtggagygygaataggagagggttaagtyggtygg

SEQ ID NO: 11405 - DNA, 1441 bp, synthetic construct
  misc_feature 1..1441: note = Description of Artificial Sequence: Synthetic polynucleotide
  source 1..1441: mol_type = other DNA
ygtaaggaggaaaaygtggaatygaatatagtagttgygggatygtattaygtgatttttttttygyggtygttttatagaatttgtgggaaggggggggagggggagtgtygtygtaatttygaggataggttagtagttygygggttygattttagtyggygttttyggggttattatattttttygtyggyggggaaattatattttttataygttygaagtygtygttttttygatayggttygttyggtygtaygtataygttaygggtyggygtttttyggtataygygygaaggtygggtttygtttygttttttatygatttygyggagyggygattatyggttttaattagtttyggatttygggygygttygggtyggtttttttttyggtttagttttygttaatygggggatttatttygttgaattygtttattygggagggygygttttygttttattgttttatattygagggtaatagyggtygtatygtttatttgggtyggggggtttttttttygttttyggtygattgagtygggttggggttttygaggaagygygggtygtygggyggttggaagtgggggaaggagaggagggggagggggtygggatatygggagtygttttttttttttttygtygattgyggttttygtaggttggtygggygttttygtatattygtttagttttttatagtttygygtttygttagttttttttttattttatttttatatatttttatttttatatatttatattyggtygtttttygtttttttattygtttgtygygygygygygygatttygtttatatatagygygygygaygtyggyggagatygtttygtttttttagatygaaygtygttygttygtttgttgaggagyggygygygtttyggtttygtttttttggygtygyggygyggygggyggggggyggyggtyggaggagttgggggtygggttagygygtygagtattgtygagyggatttgatatttgygtygagagtygtttttttagtttttygttygtattygagttatygttggtttygggggaagagaggygatggatygygygyggggagygaaaagggagygygagggygtttygaggaygygtttttttattygtttttaaatygtttttattgagaaagggaaayggatggggggggtggggggygaggtttgtttttaattygaaatygygagattagtttttttygttgtaygtttttttygtttttatattttttgtttaggttttattaatttgygtttggaatttygataygagttttttattttttygggygtagggttttgtyggtatttygaygtttttygtttagttttttygtyggtygtygttyggagttttygtttayggtggttttttttttygg

SEQ ID NO: 11406 - DNA, 734 bp, synthetic construct
  misc_feature 1..734: note = Description of Artificial Sequence: Synthetic polynucleotide
  source 1..734: mol_type = other DNA
ygggtttygttygttttgtttgygggtygatttygygaygtygatyggttygygttttygttttygagygtttyggygggyggagttgygggtgaggggggggttggtttggggggygggggtttygatgayggtatyggagygygtygtattggggatggaaatttgattgtttggttygggayggygtttgtagttaggtaggtgagtgtgggtyggagagygggttaggggygaggatygggtgggtggagggaggygygygtttttttttygygtaggtttgggtttagtggttttgggagtyggtatttttgggagatttgattyggtatgaggagttyggtatttttgttttttagttttttggaagtttttttttggattggtyggygtygttttttygatatttgggggttgaggtyggtatttygggtttgygtggaggggygagygttaaggttgygagagtygggtttygatttgtaattattttttttaatttttatggagtttygtttygygttygtygtttttagttttagttgttttgtttyggtttygaatagygtttgyggggttgttagagtattttyggagygggagygttgtgyggagagtaggggygygyggaagtygggattgtatygggttyggaaygtttaygyggaggggtgygygaaggtttatayggtattgygaggtagagtttatygttgtgtgtttagggtygg

SEQ ID NO: 11407 - DNA, 935 bp, synthetic construct
  misc_feature 1..935: note = Description of Artificial Sequence: Synthetic polynucleotide
  source 1..935: mol_type = other DNA
yggyggtgtttagggggagagggttttagygtygtygttttttaagtygattygttygtatttggttttttttttatagggttggagtttggatgaagttttttatttttgttagattttagtyggggggtyggygtygygaggtttttatgygygtttttaaagttgtygygggggaggggttatttttygttyggggttgagattagtygagtttttygtttttgttyggttygtttatttygggygtatagygttagtyggagtagttttagtagttgygtttttagttygtaygygtttaggtttagtatggyggygygyggttygggygtygyggagtygtygaggagtygtygttygtttygtygtygtttygttyggygtttagtttyggygygattgyggtgagtttatttyggtygggagygtttttygygtttagtygygttyggtagagagtttttagtygtttyggatttygygtagtttygtagagaygygygtgtygttygtaygggtyggtattygggtygttttygtyggygtgttaggatttygtatagaagygttyggaygyggaygtaygtagtygyggttaygattttygtygttygttyggttygtgttyggttttggttagtagggttgttttatttttayggygyggygggagttygagggggttttttgggaaattttttgyggggygtygtggygtaggtgygtttttatttttagggttttattattygyggttatatttggggtyggatygygygttttttttttttttttygtttttgagggagtttttgtttgggtygagggggatttygggggtttgtttagttttggggtgaggggttggtttaatattttataggtttayggttattagtagggygggattatagtgggygygggtygtaygt

SEQ ID NO: 11408 - DNA, 1054 bp, synthetic construct
  misc_feature 1..1054: note = Description of Artificial Sequence: Synthetic polynucleotide
  source 1..1054: mol_type = other DNA
yggggtgggggatattygggttgagttagttaagtygggagtgtgaggagtagygggggtyggtaggaaygtggaygygagattggggagtagtggggttgtttgtgyggggatgtagtttttattaagtataygggtygagggttgattataggtagagtagygttttttggtagygttgygggtgtggatgagggaagttaggtttyggatttatatttagayggtygttttttagtttgtttttttttttttgtgggtttttaaagtgyggtttggtttttttatttygattttgaggtttggaggtggggaygggattgtgggygtyggtaaaygtgagttttygagyggggygggaaaggagtttygygaatgttttttttagtttyggygttttaygtgtaggtttatgattgggagygtttttaatttaaatyggtattgygtygggattattttttttttggygtygttttygtygtttttttyggatttttttyggttttttttttatttttygttttyggggtttttttttgttgagygggggttgtygggatttgggattgyggggttgtttygatttygtagtygttygyggtggaagttagttygggtttggttttgagygygyggttggggyggtygttgtttatggtgttggygygggtggygygtyggtyggyggggtttgyggaggtttaggygtttttggyggggaaggyggygttttygggtttggggagygagggttttygttttaggggtayggaggatatttagattggggygttygtgggtttggtgttgtygtttygggygtyggtattttgygatatttttttttttyggttttgggagggaatygaggtagtttygygttaggttttttyggatatttggggtaaattygttttttagagtttygtgttttttttttaaatttgaggtagygatttttttatttttaagggyggtygtgaggtygaattatgtgtygattttagtyggtttttgtaaaygttgtgatgtyggttttyggaggtygygt

SEQ ID NO: 11409 - DNA, 1474 bp, synthetic construct
  misc_feature 1..1474: note = Description of Artificial Sequence: Synthetic polynucleotide
  source 1..1474: mol_type = other DNA
ygttagygtygatgttgttgttttttygttttttttatttttatatatttttattygggttttygygggtttttygaattaagtttttagtttagtttttttaaatagtttatatagygataygggtattgggtaattgtaattagttttaatyggaagtatttgtttgtgggtgagatttatttgattttyggggtyggtygttataagggygagggttgaggatttttygtgggggatatgggttttttattagtyggaaagttttagygatyggttgggygtttttgggtyggattygygtygtygttygygtattggggttttygaggtgtgatgttatttgttygtagaatyggtttttttygygtygtttttttygygtttttattttagtttttttttygtygttttyggggttaatatggtagyggygtygtygttttattttygtaatygtaygattyggttggtagggtygtyggttyggattttygagatttatatttyggttaggttygtaygttttgygtttyggattttyggyggtttttygtagttttyggggygtygattttygttygttgttataygaggttygggygttttygatagttygggattaygttagagtgaygttatatatyggatttyggygagttgygggtatgagtaaygygygygttttygttttygagtttttttygtygtygygtttatygttgaagattatggyggtygaggygtttatgayggygaaaaaygaagtatattyggggtygtttttggattyggatatgtttgygggtggggagggggtaagttttgtgggtygaggyggtggyggaggygggggygaggaygggtygggtaygaaggtttgygggygggyggyggygaaggygattyggttygttagtygttgygttttaaatattagtatygtagaataaaatggyggtygyggtygygttatatgatttgggtttygtttttgygagtygtattatttygtatygtgggggagaygygttttygggaygttyggtyggttygttgatttttttygggttgtgtygttygtttagygattyggtttyggygttyggtttygttttgtttyggttttygygggtgttttygggygtygtyggtttttggattttygtagygttggatyggtttygygtyggggyggggyggtgtggtgtgtgttttattagtatayggggyggggtttyggaygtttygttttttttgyggttgygygtygtttgtaggtgttgggttttyggygaygtttttttttgtatttttggygtgaagttgtaggtygtggtttygyggttttgtttttaagayggggttttattttttygggygttggttttttaggatttttttattaattttgggygagttaagggttttagtagatgtgyggygygygggttttttttgttatagygttygg

SEQ ID NO: 11410 - DNA, 357 bp, synthetic construct
  misc_feature 1..357: note = Description of Artificial Sequence: Synthetic polynucleotide
  source 1..357: mol_type = other DNA
ygggagatttygagattttyggtyggtgatagtaggygattttttgtttttgttaatttgtgggtttttayggaygtggggaagggaggagggaggttttagttttttgygggggaggggygtgaagaygygygggggtggggggagatgagtyggygtygttatgataaygaggtyggtggttyggttttggggattygggagggagggaggygtygtggtygygygygygggygggggyggggggttaggttttttaggagtagttggggaatattyggygattttggyggttgttttttggtggygtagggagttygygtgtttgygagtgygtgtgtgtgygaagtttttygg

SEQ ID NO: 11411 - DNA, 814 bp, synthetic construct
  misc_feature 1..814: note = Description of Artificial Sequence: Synthetic polynucleotide
  source 1..814: mol_type = other DNA
ygtygtttaagagtttggggtygtggggggyggggttgtttgttatyggtttygtttygtygataggattygtttttttttttaggttyggyggggtygatttygtttttygtttttagtttgtygtaygatagyggyggygyggygggyggagtygggaggyggggaagtagtggtygtgtgagygtgaggagttgtygttatygtttgtttttygtttttttygtttttyggggttttagygtygtgggtygygtayggttttggaagagaygtygtttygtttttattygttttttttatygygtygttttttygttttgttttgygggtttaggyggaattyggaayggtygtttttttttttygtttttygtygtygttttttttttttttttttyggttttttttttagtttygggtyggagyggggtgtyggyggyggtyggttygggyggyggygtttggttatgtygtgtyggggaaggtaatgagtygtagagtttyggggtttyggttgagtagyggyggtattaattattygyggagttggaatgattggtaatttaggtgggtgatyggttygggatttygtttygatttttygggtttygtttygggygggtygaggtttagggtygyggggttgggaggygyggtttaggttttttatttatyggagtygggygyggttttttgggttttttttttttyggttaggggaggaaggtygyggggaggygaggtttaagtgttttttttttttttgtttgtttagttyggggttgaagtygagtttyggggttttyggygg

SEQ ID NO: 11412 - DNA, 847 bp, synthetic construct
  misc_feature 1..847: note = Description of Artificial Sequence: Synthetic polynucleotide
  source 1..847: mol_type = other DNA
ygtggtgagatatygatttygtagagtagagggggyggyggtagaggggaagggttttygtatttattttttttgtaggaggtgtatttgtatttttygtatttgtaggagttygygtaggtgtaggagttatttagagagggygaygttataggaagggttaatgtggaygaattygggtttttaygtttgttaygaggagatggggtgttaagtttttttgtttttygygatataggtatgttygttttttaygaggtgaagaatagggaattaggggttttttttttaagtgtttttgagygaaggygtagggygtgggtttttttgtaggtataagggygygtagtgygtaggatgygagygggggygggggtttattagaagggtaggggtaggttttagggtttatgtygaggagagtagtagttggaggyggtgaaygggtttttttaagtaattggaygygyggtttggttagtggtagtaggtggygatgtttttatagtttygggygggggygygtatgttaagttygttgggygttygtttttgygtatygygttygtttttttygtttgtgygtttgggtttyggygtaygtattgtatttgtygttygtttttgtygtgtgtgtgtattgtyggggttygttygtttaygttygygygtgygtttttatttttatttygtattygygtgtaygatttattygtygtygttgtgygygtattgttagtttatttttygygtgggtttygtaggggaygtgttygtygtagtagtygttattgygtggaagygygtaygtattattttygaaagtggagaaaaaggygttttgygt

SEQ ID NO: 11413 - DNA, 589 bp, synthetic construct
  misc_feature 1..589: note = Description of Artificial Sequence: Synthetic polynucleotide
  source 1..589: mol_type = other DNA
ygtgggtgtttyggaggaaayggtygtagttttaaattttttagtttttttagtagggagttttttygyggagtttygtttggyggtyggaagttattttaagtygtttattyggaagtygtygttttggtaattgggtatygttttattttttttttttagtaaygtttatygttttagaygtttgaggttagtygagtttygattggtttttttgttttttattttgggagaygtttgagatttagygtttttagatttygtatttgaatttgtggygtttggtgttygygagttgtygaatgaagttgagygttttagtggaattagggattttaggggtgagygatygygaggggagagygaygaaaagggyggtyggagttggaggggygyggagttaaataaaaaagggyggtyggagttgtaggggygtygagttaaataygttatttttagatggggggttttaggygagttgtttagtttttttgaggtaggtttttygtttgttygttttttygtagtttttgagttttttttttaygtygtttttyggtagttttagagaygttaygtttgttttygt

SEQ ID NO: 11414 - DNA, 848 bp, synthetic construct
  misc_feature 1..848: note = Description of Artificial Sequence: Synthetic polynucleotide
  source 1..848: mol_type = other DNA
cgcggcgtattttttttttcgtattatatatatatatatatacgatgatatatatttttgtgtttttttcgatgtaagtggtttcgtttttcgttgggttttaggtgtttttgtaggaaatgcggaggcgcggggagtttagggaacgggtttggggttttaagttcgtgatttttatttttatttcgggttttagttttgcggcgtcggttcgtagcggatttatcggacgatgtcgaatatgataagtacgttgtttagtagttttacggcgtatacggtcgagtagagcgcggtgatggcgattgttagggcgagggacgaggcgtttcgcgcgtttggcggtttcgacgtattggcgttagcgttggggtaggcgttagggtaggcgttcgaggcgttggcgaagagcgggggttgtagttcggcgtcggcggagggggtcggttttatggttgtcggtcggtttcgtcgcgtttttttttatcgtgcgttttgggcgcggggattcgacgcgaggggagcggtaaggtagaggtcgcggtttcgacgtcgtcggttgtcgcgtttcggtcgtttcgttgtttttgcgtttcgttcgtttgtttcgtcgttcgtatcggtttagttttcggcgttcgttcgtttttttcgttcggagcgttgtgagttaggagtagtcgtaggtttttcggacgcgttcgtcgcgcgtattacgtggttcggaggcggtcgttagtttgcgttcgcgatcgggggcggacgttgtattatcggttcggagttgggtaggggaggtttttcgttttttttttagggatgtttcgtcggttcgagtgcgatttcgt

SEQ ID NO: 11415 - DNA, 1230 bp, synthetic construct
  misc_feature 1..1230: note = Description of Artificial Sequence: Synthetic polynucleotide
  source 1..1230: mol_type = other DNA
cgcggttcgtattttttttgtttcgcgggcgttttgcgattttttttattgcgttcggtttcgatagaagtttagggagtagtggttttcgcgtttcgtacgttagacgtggggttaggcggtaggtttttagtttaggaatcggggagttttttcggaagggtgtgttattcggagttagcggttttttacgtatttttttagagtgagaacgtacgcggcgtagttatcggttcgttttttttatcgggggttttcggatttttaatttgtttggggttgtttttgtttttcgggcgaggggtttttggggatttaggatatttggttacggggaggcggggtatggggggtagaaagttagatggagcgggtaggagaaggggggtgttgggaggagttaaggagggagagagggggcgtgtatggggcgcggagttaagagttatcgagtttgggcgcggtgtgtaggcgagggttacggttttcgtagtagcggggaacgcggggagtcgaggtatttagcgggtcggggaagaaggtgggggatttcgcggacgtcgaggagagggtattgcggagttagtaggttttgtagggagtcggagaggggttgagtagattttgaaggcgggcgggggacgtatttttcggcggggtagggtgttttcggatacggcgagcgcgcggtatagttcggtagggtgatagttttttagcgtcgcgtatagttcgttcgttgggggtttaggggtggcggttgcggtagggggtttcggggtcgggatcggagcggcgggcgcgattttcgagtcgggagttcgggcggcggggttcggggtggtcgtcgttttttttttttgttgtagttttttgagtcggcggagggttatggtttcggcgtcggacgttttttagagacggcgttggtttttttcggcggggttggcggcggttgggggatgttagtcgggcgggtcgcgggtcgtttttttttataggtttcgagagcggggcggggttgggggcgggcggggagttgtttcgggtggtttcgtttttagtacggaggatttttttcgcgaggcgtcgtcgttttggagtttcgtttacggcgttcgacggtcggggaaattgcgggagttgggcgtttagtgggggaaaacgagtcgcggacgcgaaggggcgggatgaggttttcggggcggggttcggggttcggggttgcgt

SEQ ID NO: 11416 - DNA, 1094 bp, synthetic construct
  misc_feature 1..1094: note = Description of Artificial Sequence: Synthetic polynucleotide
  source 1..1094: mol_type = other DNA
cgcgggagtttttcgagttttattggttttttttttcggtcgtcgttacgcggggcgtcgcgtttttacgggtttagacgtttagttaatttttcggttttgtaaaagtttttgggggtgcgcggggttgggcgggggtgcggcgtggttttttttagggtgggttttaaagtttttattttcgttcggggcgttgatatcgtcgattcgtaagtttatgtcgcgttcggagcgtcgcggggttagtacgttcgggcgggcggttcggaggaggcggcggtacggttggggtattttcggtttcgattcgcgatgaatggggcggttcgggtttcgtttttcgtagtttcgttcggaggtttcgtttttcgagtttttcgtttcgcggttttcgttagtacgttgttcgggcgttttttaaattgtttacggagtcggatttcgcgttgttaacgtttcgtttcgggtaaggttgcggttttcgtcgggtttcggcgttcgttgtttcgtacgttcgggttcgggaggaggaggtcgggggagtcgggtcgggcgtcgcgagcgttgggagggttcggtttcgtcggggagcggttttcgagggcgtaggagcgggagtcgggtcggagattttcgcgtagttcggtgatattttcgtttcgcgttttagttcggggtttttaggtatcgcgcgcgtttaggcggcgtattcgtatttattttcgtttcgaggttcgtttcgttcgttacgtcggtcgtcgttaacgagttttcggttcgcgtcgttttagcgttttgtagcggaggcgtcgtttttatttcgatcgtaggttcgttcgggtcgttcgttcgtcgggtatcgagtcgttttgtcgcgcgttgcgtttcggggcggggtgggaggagagggagtagtcgttattttgtttaggtcgtcgcgggttagttttgtagttagttttagttttgggtcgggtgttgggaaggtcggacgtcggtcggcggtcgcggggtttgtttttcggaggttggggcggtttaggttatagatttcgtcgttttcgtattttttttttagttatttttagcgtcgt

SEQ ID NO: 11417 - DNA, 1979 bp, synthetic construct
  misc_feature 1..1979: note = Description of Artificial Sequence: Synthetic polynucleotide
  source 1..1979: mol_type = other DNA
cgtttatttttttcgcgtgttggagaattaattagtaaggtagggaatgcggttcgtgggcgtttggtttttttaagcggtttaggtttttagagcgcgaggtttaggggttttggagtcgcggtcgcgacgcgttcgagggtcgtttttttcgacggtagagtaagagttatcgcgcgggagtttcgagcgatcgtttcgttgtttcggtatttttttttcgtagtcgtttagagttttttatgtttcgtgacgttcgttagggtagcgcggtcggaggtcgggtcggacgtggttcgagatgttcgggggtaggtagaagattacgggtacgcgataggtaatcgtcgtttcggttttagaggtggacgttttgtttttttgcgttttaatattagattttgtttttagacgatatttttgttgttttcggtatttggaaagattaatcgttaggttcgagaatgtaagatttatttttttttgcgacggaggtagttaatttagttgttcgttatttttagtgtcgtatgcgtttttacgtaggattttgtttaatcgttatcgggacgtttttttagtttcgttttcggatcgttagagaggttgttaatttcgttttttttttttattttattagcgtattaatttacggcgttgtgacgtgtatagtttttgcggtcggtcggggcgggttaatggcggtggcggatacggcgggttaatgggcgggagcgttttatgcggtcggttttcgtcgtagtcgtcgttgggttttggagttagaggtcgttttgagacggtgcgcgatggatcgagggttttagtcggggaggcgtcgtcgtcgagttcgcggttagacgttttattagtagcgttcgtatcgggagtcgcggttttcgttcgagtcgtgggcgcgttcgaggggcgggttcgtttttcgtcgtttttcgtagttttgtcgggttcgagttcgcgtcgtcgtcgtcgtcgttttgtcgttcgggtcgcgcggttcgggaaacgcggtcgcgggttgtatgggtagcgttcgcgtttcgtcgttgagtcgtcgcggagtcgcgtagttttcggagtacggtgagaggcgtcgttggtttgggggcggtggtcggggcgggtacggggtattcgcgcggttttgcggtttgtaggtttttttcggcgacggagttgcgtcgcgggttttcgggcgggtttggggggtcggggtcgggtgggcgggggtttttgggggttcggggcgatcgtgagggattaataatgggtttcggagcgggtttacgggttcgggttcggggtagtcgggggtttttgggggttcggggtggtcgtgaggggtttatagggggtttcggggggggtttgggaggtcggcggagtttgggtcggtcgtaaggggcggacgggggtttcgggcgggtttgggtggtcgggggttcgcggcggttttgaggggtcgattgggggtttcggggcgggtttgggggtcgtgggggttcggggcggtcgtgagaggcggatagggggtttcggggcgggtttcgggggttcggagcggtcgtgaggggcggacggggggtttcggggcgggtttgtaggttttggggatttgaggttgtcgggaggggttgttagggggcgttggtcgggcgtcgggttttgcggagttggggcgtcgatttttgattcgcgagaggggcgttttcgtcgtgttggtcgtagttgttatttttagcgtttttattattatcgttgttttgaaatgagagtaggcggttttcgggtttcgagtcggagggggagggcgaattggggatttgggggcgtcggggttgtaggaggcgcgcgtaggtcgaggaggggtaggaatgcgggtagtcgtgtggggggtgttagggggagggtaggcgggcgggtgtggggggtggttgggaggaaagcggtggcggtggcgg

SEQ ID NO: 11418 - DNA, 1930 bp, synthetic construct
  misc_feature 1..1930: note = Description of Artificial Sequence: Synthetic polynucleotide
  source 1..1930: mol_type = other DNA
cgcggggagatcggggcgcgcggtacgcggcgtttttatttgtggatgtttatttttcgtggagggcggtgggttttgtcgtaggagattttggcgaagacgtcggttacgatgacgaaggcgattatttcgtaggtgatgtagacggtgaagttggttttgttttttttcgggtcgtatttgttttcgggtttcggcgatattattttggtgttgggcgtttgtatttatatcgggttttggtagttggtgtattggcgttggtttagtttttcgtggcgttttttgtagtagaagcggtagtagtaggtatcgtagtagtataggtagtcgttttcgttgttgttatattcgaattttttgtcgtattggtcgtttacgtcgtagtagttttagtacgtttcgtaggtgacggtcgcgttggtcgtcgtcgttatagtcgtcgcgggttgttttcgtcggtttttcgttttcgggatttcgggcgttcgggcggtgtcgtttagttcgcggtcgtttcgtgttagggcgttttcggtttttcggttttcgacggtagcgtcgtttgtatttagggttcggttggcggcgcggtcgcgggtttcgtggacgttgggtagtaggtttagggattttagcgagagtagtagtagtagtaggaggcgtcgtagcgttatggcggggtcgggcgggagggcgcggggaggttttcgcggtaggtcgttttttcggcgggtcgggttcggaggattcgtcgcgcgggtcgggttggaggcgttgagcggttagcggtttcggggcgatggcgttatcgaggcgcgggcggtagtggcggcggcggcgcgcggtgcgtacggatcggttcggcgcgggttgttcgggtttttaggttgcgcgtcggtttcgcgttttttttgcgggttcggcgcgttttttgggtagttttatttttcgtcggcggtgattgcggtttcgcgcgcggttcggtttaggtaggattcgaagcgcggtttcgggcggcggcggcggcggcggcggcgtggtttcgttcgggcgggttttgcgggataagacggggagtcggttacggggtggggcgattggcgtttcgggagtaggaggagaatcgcgggtaggcgggcggggagggtgcgcgtagttttcgaggagagagattcggagtcgggaggggcgtagagttcgtttttaagacggggtttcgcggttttgcgcgtttggaatcgagagcgtacgggtcgtttttttaggcgtagttcggtcgttcgggttttttagtcgttcggtttcgtagcgcgttttcgtcgtaggttggttttttgggacggagtcggttgaggttggggttcggcggcgagtcgggagagcgcgcggcggttggattttatttatttattatgttcggttgcgattgtagaggcggcggcggcggcggcggcggcggcggcggggcgaggcgggaacgtagttgtcggagcgagcgagcggagagtcgtcggttcgtcgtttgtattagtgtcggaacgtgtgcgagagtgagcgagggagatatacgtatttatatattcgtatatacgggagcgtcgcgaggggaggggggataggggaggggagggtagtcgtttttcgttatttacgtttgtacgttcgggcgtttagggtgcggggcgggggggattttttttcgtttttttcggatcgtagtagttgaagtttcgcgttacgaaagtttcggatagtagttattcgatacggcgaattcggcgggcgaagagggggtcgggagtagggcggaacgttcgttttgtagtcggttcgcggtagggattgattttttttgttattgttttttttagttttcgcgattagtttttattttatcggagttcggggtagcgcgttgtttgagcgg

SEQ ID NO: 11419 - DNA, 3177 bp, synthetic construct
  misc_feature 1..3177: note = Description of Artificial Sequence: Synthetic polynucleotide
  source 1..3177: mol_type = other DNA
cgtaggtggggtaagttcgggttatcgacgagatttgttcgcgttttcgtttttattttggtgtttttttttttttttggtagttttttttttattcgtttatttttcgggtttatttcgatttatttggcggtgggtttttttttttttcgattttcggcggtgcggttcgttttttttttgatttcgcgtttggtcgtcgtgtttcgaaggatatgggttatagatcgtgcggagatattagtttcgcgggcggttgttttggtttaagtagaagaaaattatcggggttagcgtcgggtacggtagttttttcgtttcggagttcgcgttgttcgggtttttttttgttgatttcggtttcggtcggttttcggttttcgataggtcgttgagtcgtatgaagtttcggggttgtttcgatttttcggcgttcgttttattttttttttcgtttattttttggttagtcggggtttcgggcgattcggagaggggtaagcggcgttttttagaggaggtgtttttacgtaattcgggggtttcggcgggggtatatttggtgggttttagggcgtaagttgagttttcgggagggttagtttagtttagttttttttgttcgtaggggtatgttgttcgcggggcgtcggggcgtagggaaatttcgttcggcgcgagtttcgttttttttgcgtttttggggtttttcgggttagtcggtcggtttttttttattttgtttcggttttttcgtttcgcgtttaggtttcggttgtcggattcggcgttattttcggcgaagtcgtttcgagagggcgaacgaaaaggggggtagcggcggagggcgggggttcggggaggggcgtttttttttttcgcggcgtagttggagtcggatttaaggggttagtatcgtttcggtttcgcgttaggcggcgggggaggggaggagggatttttttaggggtgggtttggagggggtgggggcggttttttttttcgtttcgtcgcgggtttattgttcgggaggggcggggagatagtggggggtagtttcgggcgggagtggaggcggagatgtcgtcgtcgtagtcgtcgcggtggttgtcgttgtcgtagttgtcgtcggcgttatagttttttttttcggtcgagacgcggagcgagcgagcgaaagcggcggcgaggagtttcgcgtatattatagttggattttttattttaattttaagtttcggtttcgtttttagatagtttcgtagttaatcgtcggacgtcgtcggtttcgagtcgcgcgtttattggtcgttcgtcgtggtagtgcgggcgggagcgtagggagagaattatagttggaattcgatttttattttaaaatttaggatcgttttttttttttttttttgtttttgggttcgttttcgaaggttggagttaattagattgttgtttagatcgaatttatttttttattggttattggggtttttgggatttttttggagggagttcgaagaattagagtattcggcgcggggttttggcgtagggtcgtaggttttaggtattttttgtttacgatttttgatttgggtagtagtcggaggacggagtttagttttgggcgggtttggggaagaaaggagataggcggtacgggggtgagggttgttattagggggttttagagcgaaattttaggtttttatttggttaattttttattttggagttgagtttggttgcgggattgggggagggaaggagcggagttggatgttttgggggtggggttttaggttggaggggtttagttttggagaaacgggcggagttcgagaaaggttagggtaggtatggtttgggcgtggtttttataaattttttgggtttattggttatattttcgagttaattttgagatttcgattttgatttcgtaattttaattcgttggatttgattttatattgacgtttttgggttttatttttttgtttttagggattttttgaagggcgtggattttacgtaggggtttcgtgtttgaatacgtggttttaggtaggtcgcgttggatcgtagagttcggatttttaggaggggttgcggagtagagcgaggatttttaagaaggaatttgtgggggtttcgagtgtgtgggagggggcggaagtatagagttgggttttatcgattcgatttttaaagtttttattatcgttattttttaatttcgtgttttagttttttttaagtttttatgtggtttagggaaagagtgttcgcggaattggaatttcgcgggtttgtcgtttttatttatttattttaattttatcggtagcgggttttcgtgggtttgtgttttttacgcgtgtatacgtacgcgtagatttcggtttttgtttcgtttattttttcgagttttggggtttagtcggttttagtttttttttgtcgtcggcgttattttagaaagttgtgggtattcgggagcggagcgtcgcgggtgtgttgggcgtcggtggaggggggaatagcgaggattagacgtcgggaagtatttttttaatatttgcgagaggtagatacggcggaatttagtgggttagttagtttttttttcggagattttggggcgtttgcgttattgcggagaggcggcgggatgggtcggatgatttttattattattttttattttgttgaggttattatttttgggcgttgtttatttttttaaggttgtattatttacgtagttttcgcgtatttttcgttatcgtagagggttggggtcgttttagttttcgtttcggtcgatggggggaggggatgggggaagtggtagagtggttgttgcgtcgtcgtttttttggttgttttttcgtcgaatttatgtatagagttgtgtaaatgaggtcgggcgggtttatttgtattttatgttaatgagtagattttttaagtgttttttttttttggcgggagtttttgtttttattttgagtatgcggcgtttgagttttgaatttcgtgtcgttttttgggaaaggggggttatttatggttgtttcgcgcgtttgatatttttttttttttcgagaggtcgtagtttgtcgggtcggtttgtttttttcgttaggatagaggtttcggggttggcgcga

SEQ ID NO: 11420 - DNA, 2195 bp, synthetic construct
  misc_feature 1..2195: note = Description of Artificial Sequence: Synthetic polynucleotide
  source 1..2195: mol_type = other DNA
cggtagagaggacgttatttacgagagagagtgatcgcggatttttatcgagaggtaggcggtggaggggttttttttggagatttcgattatggagtggttttttttttttttagttcgagtcgtagcgtcgggtttttttatttttttagtttttagtcggttcgggtttgaaaatttttagcgatcgagcggagttggcgcggcgtttttagttcgtaggatgtttagttttttcgtttttgttttcgtttatttttcgtcgtttcgattcgattttttcgggcggcggagcgggaaggtagtagtttttatttgggattcgtcgtcggtttcgttttagcgtagcgtttggggttaattttagttttaggcggggggcgggcgggggtgggagggacgcggcgcggggcgttgggttaggttcggttttggttgggatggcggggttcgggtcgggacgtagggtttgtttttttttgggatcgaggttgagttaggcgcgttgggttgttcgttttcgcgcgggtttgtttttaggtagggttttttgttttcggcgagggtgggttggagtttgtattatcgttatattatttttatttagggcgttaatcgggcgttcgtcgcgttttaggtacgtgcgtttcgtttatataggaataaagtttgttcggtttttttcgtttcgatttatttttaggttgagtcgattcgtatttttcggttggtgagggagatgggagtttttggttttgtcggcgtgtgggttgttgttgttgattgttacgttttcgtatgcgggcgcgcgtatatttacgcgtatttattttttgggttcggttttcgtcggggtaattggtgtgagggtgtagttttgcgtattttttatcgcgttttttagagagcgcgtttacggatacgcgcggggttattttggcgcgttttcgtgggggatatttagtttttgttattttcgttttggttttttcgtgagatatattttaggtatagttcgttgggagcgggtcggagcgaggcgtatatttaagatagagttcgtttttgttacgttttttgcgtttttttttttttttagtttgtatacgtggatatatcgtatatcgaggttcgttttttgtacgtacggtttttttttgggatttttattagttattaagcgtacgtgggatcgttattaagcgttttttttacgcgtgggtcgagtttagattattttggatcgtgggtaaaggtttttttcggttcgattatttcgcgttcgggttttttgtgatcgttttaggttttgtttaattcggagcgcgtttttttttttcggcgttttcgttttttgtttcgatttgttttaattagtttttacggttttgtttttcgaggtatagtgtttagcgcgattttttgggtttttgcgtttcgggatacgttggttttgatttcgagttcgttttttttaggaggttaggtttttattagttttattttttattttttgtttcggggtggatttgtgggttgttattttttttttttcggttttaggaatttgttgaagttggatcgtagaaattgggaagcgaatttaggttggtatttatttagttcgataaataagagatttttcggtcgttttttttcggggttgttggtttcgcggggggtggggtgcgtagttttgggggttcgtagcgaggtttagttagttcgcgttagaggttcgtaggggttgaggcgtatagaggagggagaggttgttgggtttggttagggttttggagacgcggagggagggtagggcgtcgagtttcggggtgtcggtttttatgacgtcgaattgtttgggggatcgttagcggtgcgtcggtcggagttagttggtggcggggcgggcggttcggagtgtttgtttaattttgagcgttcgcgagggggaggggaggtagttggttacgggttagggggtagtaaggtggaggagcgggggttgggaaaggggagggtatttttcgggttgtttgtttgcgtgtttgtcgcggtttacgataatcgggagtttaaattttatgaattattcggagttgttggagcgataaattttaggttggttttttttttcgtatatcggtttttcggatttttggagggaatgtttgtttagcggtcggagttggcgg

SEQ ID NO: 11421 - DNA, 2063 bp, synthetic construct
  misc_feature 1..2063: note = Description of Artificial Sequence: Synthetic polynucleotide
  source 1..2063: mol_type = other DNA
cgtttaaagtagaggcggtaattaggcgttcgggttacgttatttgataataggatagatgttgtacggttcgttttttttatacgtattatttcgtagttcgtagtatcgttagaaaatttatttgattttagagtcgtagagcgtttaggggttttttttcgtttattcgtagtacgtttcgggtttttttttttttttaaataacggtatcgggtttttgtattaaaatacggcgggttcgcgtttgttattattagtgtaaaatttgcggggggttgttcggaaaggatcgaattttatcgttgtatgagttttaaaagggagggggtatatttatttttagttttttattttattttcgtttgattgtgatgtatatcgggcgtttgtatagtttcgttttatattagtatatacgcgtttcggtttcggtcgtttttcgtcgttttttttaaattcggtcggttcggggtttggcgtcgtacgcgggtcgttaggggttagcgttcgtttcggttcggttcggtcgaataaagggttcgcgaatttttcggtaaagttgcggttgcggcgaggagcgggcggattgtcgcgtttatttgggtttcgttttcggcggcggcggcggtttcgcggggtttcggtggcgcgggtttggcggcggcggcggtacgaataatcgttcgagggtttcgggagtgcgcgggcggcgggggttcgtttagcgtcggcgttacggatttaggtttcggcgcgggcggcggcggcggttgcggcggcggcgcgggcgagtgggcggcggcgcgtttcggtaggtttaggttcggtttcggtaacgtcgcgacgcgtttttttttttacgttcggcgggatgcggtttcggcggggttcgggttttaggcggcggcggcggcggcggtggtagttgcggacggttgggcgcggggtcgtttcgtttttttcgttttcggttcgggcgggtttgcggttattgcgacggtgacggcggcgggagcgcggcgggcgttgggattgttttgttagggggcggttcgggcggcgtttaagattgcgcggcggcggggtcggcggcggcggttacggttttcggggtcgtcgcgttgaggtgcggagttgttatcgcggttattttgttgttttaattgataagaattttttttttttcgttttagttagacggggcgttcgcgttttttttttcgtttcgcgttggtttttaataggaagtcgtttcggtttttagtacgtgatttttatcgtatttgtatatcggagggcgaattggttaatcggtattttgtatttgagtttttttttcgcgcgtttttttcggtttattggtttttcggttaggttacgtttttttttttttttttaatattcgttcgcgttgtggttttttgtatcgcgcggggagcgcgtcggggtgcgagcggtgcgcgtttcgagtggtcgggacgcgcgttagttttgggagtttgtattgttcgggggggttacgtggagatttgcgtggtgttttttatcgtcgtcgtttgtttttcggtttttgggcgttgtggtttcgcgttagggtgttggcgggaggggtgtcgattcggttttgcgcgttcggtgggtttttcgggttagcgtttcgcggcgttcgggttttatgttgtaattgcgttcggcggcgttcggcgttcgtatcggcgcgcgtttcgttcgtgtcgtgtatacgttttgtatcgttttattttgtatacgtatacgtatacgagtttttggggttttggagtatcgtgttcgtttcgcgtttttcggttcgtttttgcgtttagtcgttttttagggagcgtttagttgcgagtaaaataagtttcgttgcgaaatagtttttcggggagatagtttttttttcggagtatagatattatatttttatcgcgtaagttttcggttcgggtcgaattcgggcgtttcggcgtttacgtattttacgattttttttcggtgtttcgtacgtcgtcgtgattttttattttacggtttttcga

SEQ ID NO: 11422 - DNA, 816 bp, synthetic construct
  misc_feature 1..816: note = Description of Artificial Sequence: Synthetic polynucleotide
  source 1..816: mol_type = other DNA
cgtagtaaagagtttcgggcgttttgggggagagcggttttaagtttcggaaagtgggtagagtttttttttttagggttgagacggtaggcgcggggtttttttcggattcgtttcgttaaggggatagtgtaggtcgtgtcgcgatttagattcgacgttttcgcgggtttcgcggcgttcgggttgttttcgtcggttgggagcgttcgagtggttttcgggaatttatcgtgaagtaggagggtcgggaataggtatttgagtaggaggcggcgcggttaggatatttttagttttgttttggggtttttcgtacgtcgcgtttcgatttggtgttcgggtaattgggcgcgcgttttgtttttcgttttcggtcgggtgcggtcgggttaggtcggggttttaggcggttgtcgcgcgttttatgttcggcgggttaggcgcggggttgcggggcgcgcgttttttgggcgtcgtcgggcggttgtgggcgtttcggttcggttcgcgtttcggtttttttgtcgttcgtttcgattttttcgcgttcggtttcgcgtttcgtttcggtcgtcgtgtgcgtcgttttgagttgtagtggtcgttatcgttatcgtagttgtagcgtttttttatatttttagcgcgtcgtcggtcgggtagtttggtcgcggtacggaggaggggttttggagggggcggtcgggggaggcgacgtcgagttatcgttttcgggtagtcgtcgtcgggggggagcgcggagatttgaaagggcgcgtcgggtaacgttttttttttttttatttcgggcgt

SEQ ID NO: 11423 - DNA, 368 bp, synthetic construct
  misc_feature 1..368: note = Description of Artificial Sequence: Synthetic polynucleotide
  source 1..368: mol_type = other DNA
cgtgtcgtttgcgttcgtgggttatatatattttttttttttttattgttttttgggcggtgtggattagttgtagagtgtgatttgcggttagggagtgttttttcggagttttcgtttttagatttttggtgttaaagacgttttgtgagcgggtggggtcgggcgttttagttacggcggtcgtcgtttttttttttcgtaggacgggatagcgtttttgtggatcgcgttttagatgggttatagcgaggtggtgcgggtgatgttgttgcgcggagtcgatcgcgacgttgcgcggaacgtgagtgttcgagtcgcgcggttaaagagcgaagtttttcggcgcgtttgtgtggagaaaacgg

SEQ ID NO: 11424 - DNA, 1411 bp, synthetic construct
  misc_feature 1..1411: note = Description of Artificial Sequence: Synthetic polynucleotide
  source 1..1411: mol_type = other DNA
cgtttttcgcgtttttttcgcgcgcggtttttggagtttttgaggcgcgcggttagtttagttcgggttcgtagtatcgggagtagttcgtcggttaagcgagcgcgggtcggggtcggggtcggggtttgggggcgtcgttttcgggagtttttttgcggtttttgaggagcgagggcgacggcgaggttgatcggggtcgaaattatgaatcgaagtttttataagttttagattttgcgattttacgattgtagcgtagtggaagttaagagtaaggtaagtttttcgttcgtttcggcggttttgcgtttagttttttggttaatgaatggggcgtttcgcggagggggattggggcggcgtggaggcgataggcgtcggcgataattttttagttcgggcgtcgcgcgtcgtttcgcgggacgcgtattggggatttcggtcgtttttttcgtttttcgcgcggatataaagttcggtagtcgcggcgtttagagggtcgagggttatcggatagttcgggtagattttggattcgtttcgcgggagttgtttttttgttttacgagtgagaggcgatcggggcgcgttatatattggaggggagggcggttttttcggggcgagttgagggttaggggttgttcggattcggggtcgtgggggggttttgggggttcgggtcgtgggatggttttggttaaggcgtttttaaggttgtaaaggaggtttgttatttgttaggaggagatttgtcgtcggtttcgagttcggcgttttttattcgttcggtattaaatatttaggtattaggcgcgttttttcgcgtagatttagagtacgtattcggttttttttcggtttagatttagattacgttttttcgggcgcgttttcgggttagatattttattttatttttacgggcgcgtttttattttagatttttttattttcggacgcgttttcgttttagatttagtttattttttcgggcgcgttttcggtttagatttagatttttttcgagcgcgttttcggattagattcgtatttagattatttttacgggcgtgttcggtttttttcgttgtttgcgttcgggcggagcgtgttcgaatttgcgggtcgcgatgcgcgtttgggtaattggttggtaggatttggcgtttttgttttttgcgggggtggttttttcgtcgtagatgttattgtttgtgagggtttttttggtggatttcgcgggttgaggaggtgttgtagttgttcggggttttgcgggagggggtttttcgagtttttcgttggttattttttgggagttgagcggttttttcgtttttttttttttcgtatttcggtttttagagttgtgggaaaggtttttaacggcggagtgggagttcgt

SEQ ID NO: 11425 - DNA, 1487 bp, synthetic construct
  misc_feature 1..1487: note = Description of Artificial Sequence: Synthetic polynucleotide
  source 1..1487: mol_type = other DNA
cgggttttgcgattcgcggcggaggcgtatagtaggcgtttaaacgatcgtgggtttagggtttcgcgttagcgttttcggggttttttggagagaggtagggtttcgtcgtttcggttttcgtaggaattagttggagaaaggcgggcggtttggggttgaattttttttattttttatttttttcgtcgtttggagtagatacgtcgtcgtcgcgtttttgggaacggttagggaagtaagtagaagtcgggaagtcgcgaaagaggcgagaaagtgcgattttttttttagattttcggtttttcgtcgaaatttttgtcggtcggttaaattttagataatggaagttttacgtttttatttttatttttttttataagttcggtcgcgggtttttttcggttcgggatttcggcgttagtttcggagtcggagtttgtacgatacgttttttttcgtcgttttatttttttattcggagatcgtttatttttttcgttttatttttttatttttcgtttggtcggtttcgttcgattcggaggcggcgtttttttttttgttttaggtttaggaaggaggacggcggaggaagtagggggttttggttgcgggcgtagggatgtgggtcggcgatcggcgttcgagggcgtaaaaaggcggttcgaggattgcgcgcgggcgggtagcgcgggaagtcgggaagaaaggagggcgcgcgggggaggaggttgcgggtgcggggttcgaggtcggggcgtttattttttcgcgtcgttcgcgttcgtcgtttagttttcgttgtaggttttgcgcgcggtttttcgtttcgttcgtttgttgttgtagggtttggattttgcgttttatcgtttttagggagttgaggtcggttatggcgcggaggcgtagaggcgtacgggtagcggcggacgttcggttgggttcggtttcggcgagagttgtatagtcgcgtttcggttttttaagtttttgtttgcgcgggggtcgttttcgttttttttcgtttttcgggtcggttgtcgtcggggcgatgaggttattcggtcggatcgtcgacgttagtatcgttgggggagggtttgacgtcggtatcgttggttatagttgttggaaagtgttttttttcgggatttatttggagaaagcgttgggaggcgtcgttttttttttttttttttttttttttttttgcggtttttttcgttttttcggtttcggggtttcggtttggtttcgtcgcgggttttcgtatttttgtatacgtacgtcggaggttttttttttcgtgagttttagttttttttgcgcgttttttaggttttcggaatatttatttagttcgttttttgttttttttagttttttttggaggtgcgttagttttttttttatttggggacgatagagcgaggaacgggttagtttggggggggggttacgttttcgaggtgtaggggcgg

SEQ ID NO: 11426 - DNA, 602 bp, synthetic construct
  misc_feature 1..602: note = Description of Artificial Sequence: Synthetic polynucleotide
  source 1..602: mol_type = other DNA
cgcgtatcgttgttgtattttttttaacgtattcgtaattttttttaacgtattcgtattttttttaacgtatttatattttttttaaggtattcgtattttttttaagttattcgtattatttttttttttattttatgcgaagattgtagtttcgtagttttgcgattagcggtcggaagtagttaagatgttattgtttttagtatgtttcgcgaggcgcgtatagtataggtttttttttaaggttattatttttattttcgttgtatgttgggattgtagttcggtcgttttgtgattaacggttggaatcgtttaagatattattttagttagtatggtcggtaggagcgtatcgcgttgtttttttttagggattcgtatcgttttataattttgttttgtgttgagattgtagttttgtaggcgtataattaataagttgggtgtagataagagattatagtttttcgtattttaagtaaaggttttttttttacggagtttttttacgcgtttattgcggtttcgtcgtgttaaggggagtttggttgtttacgggttttatttgttagcgagaagatagtttggtcgggcgg

SEQ ID NO: 11427 - DNA, 628 bp, synthetic construct
  misc_feature 1..628: note = Description of Artificial Sequence: Synthetic polynucleotide
  source 1..628: mol_type = other DNA
cgttttatcgagaatagaaagtgcgttttaggtattattcggatttcgttaaattatattatttagaaggtagtgttataagggacggaagtcgattttaagttatagacggaaggcgtagaggggcgttttcgtagcggcgtgggcgggattttcggcgtttagttttcgttcgtcgttaggttgcggttgttgtggttgttaacgttatattgggtagaacgttagataggggttatttttcgagatcgagtagagacggatagtgaggaggataggatttatttatacgtttttatgttagtcgcgattttatttttataagcgtttgtaaaattttttttggggttttggcgatagttttgtgtttttacggcgcgtagaggcggcgtcgcgaattttgtgtgtattttatacgacggcggggattgaggtttttcgtagtttagagtcggagttcggggtcggtcgagttcgtaggatcggttttttcgtcgatttttacggttttatttagttttttgggtttatggcggcgtcggcgttggtgagtggagggtttcgtagttcgcgcgagttcgggttatcgttcgtatgtatttattcgttgtaatacggcggatgtcgg

SEQ ID NO: 11428 - DNA, 215 bp, synthetic construct
  misc_feature 1..215: note = Description of Artificial Sequence: Synthetic polynucleotide
  source 1..215: mol_type = other DNA
cggttgcgtattgatcgtatttgttatgttttattttttttaatcgaagttgaaggtcggtttcgatgtttgttattttttataattttatcgtagtcgatagttttataaatattatcgttcgtttagttttcgttttttcgggtcggttgttatttcgcgttttcggtttggttttggtttcgtcggttgtattgtacggttcgttttttcgt

SEQ ID NO: 11429 - DNA, 2638 bp, synthetic construct; identical to SEQ ID NO: 7166
  misc_feature 1..2638: note = Description of Artificial Sequence: Synthetic polynucleotide
  source 1..2638: mol_type = other DNA

SEQ ID NO: 11430 - DNA, 2172 bp, synthetic construct
  misc_feature 1..2172: note = Description of Artificial Sequence: Synthetic polynucleotide
  source 1..2172: mol_type = other DNA
cgcgtaggttgtgtacgtgtttgtgtgtacgtgtttttcggtgtgtgttttagttttagtgtgttggcgcgtgttcgagtatagatatatcgggggtgtttgggtattcgtatatggttgcgggtggggcgtagtggagaggaagtttatatatgcgtgtgttgagatatggtcgtatttttgtgtttttttagtttagacgtaggggagattagtatcgagatattcgagttcgggagttttttagcggcggtcgggcggagtttggttttacgtggggttggagagtacgtaagtttggagtttcggcgttcgtttttcggttgtcgtcggtttttgtagaatcgagtggtcggatggtagttcgcggggaggttcggttattcgttcggttcgttcggggcggggagaagaaggagagttggagagagaatcggtcgcggcggtcggagaggcgagcggagtgtaagagaggcgagcgtttttgttcggcgttcgggcgcgtttttcgtttttttcgttcggttcgtttgttcgttggttttttttttttttttttttttttttttttttggttttgtttttttttttgattttcggttggatgattgaggtattttagacgtgggttgaattagagcgagcgagcgagtttaggggttgtagcgatttttcgataagttatttagaggcgattttgtgcgcgcgcgttttttagtggttttcgttcgttttttgattatgttgatatatttataggataggtagtagtatcgatgcggcgttgcgacgttatagttttcgatattttttttttataatttagttttattttttagtattcgatttgtgaaaattacgtttatgtagtaatataattggttcgaaagcgttaaagagttaattaagaggttttcggtttttcgtagtttatagcgtagttcgattttttagagtcgtcgagtagacgttcggtgaattttagaggcggcggagggtggcgaggagttttcgttttttttcgtttttttttttttcgatttcgttttttttttttttttttttttttttttttttttttttttttttgttttattttttttttttttaaattttttttgttttgcgcgtttggatatagatttaggaagcgaattcgtttacgttttaggataaggaagagagagaggtacgggagaagagtttagtaagatttggattgaaatcgagatatttttcggaggttcggagtagaggaaggaggaggagggcggcgaacggaagttagtttgtaatttaagttttgatagcgttggtagaagggggtttaaattagatttttttttttttaaaggagagagatttttttcgttttttcgttttttgttaaagtcgggtttagtatagttgtagacgttattagtgagaaagagggagaggaagatagatagggggcgggggaagaagaaaaagaaaggtaaaaagttttttaggagaattttttatatttgtaataaaagatttaggggttggagagagatttttgggacgtagggttggagtgtttatttcgagtttagcggtagggttcgggcgcgagtcgagattttgttcgtttttttcgtttttgaaatcgacgtttaggagcggttttttaaaaacgtaaggtataaggacggttattcgcgcgattatgtttgttgatttttcgttttgttttttttaaaagcggttttttattttttaaaagatatttttttttttttttttgaagtgtattagttgtgatttttgtttttttttttttttttttttttttttgttttgttttttttttttttttgaattatgtgttgttgttaaataataataaaaaaataataaaatatagtagttgcggatttgttttcggttggagtttagcgtttcgtttggagtggatgagtttttttatgagagattcggttatttttgggataagtatggtttattattcgtttttattttatcgggcgtcggatttcgttatgagcgcggtgttgggttattagtcgtcgttttttttcgcgttgacgttgttttttaacggcgcggcggcgttttcgttgtcgggcgttttggttaagtcgattatggattaattggtgggggcggtcgagatcggtatttcgt

SEQ ID NO: 11431 - DNA, 2548 bp, synthetic construct
  misc_feature 1..2548: note = Description of Artificial Sequence: Synthetic polynucleotide
  source 1..2548: mol_type = other DNA
cggagttgtagtagaagcgttttcgatttcgtttaggtttttagtttatttttttttgaaggtcggtagggggcgttattatcgttggttttttcgcgcggtttcggttttcgtttcgggaatcgagtgtttgtagttcgcgattttggggaggtatagggttagggtatcgtttcggcggagaaagtggttgtgtcgcgcgggtggggtcgggttagggttgggttgggttggagggcgcggggtatttgagtgaagtcgtagttttcgggcggggtgtagaggagattttttgagcgttggagcggggagagttagggcgggggttaggcgtcgtagtttcggacgaggttcgagtagtttttgcgcgtttcgtagtaggtttagtagcgtgtgcgttagcgagcgtagttttgcggatcggataggagtcggagcggcggttagaggttggttaggtttttttttttttgtttttcgttcgggttcgggtgaatagaattgatcgtatcgtcgtcggcgttgtaggtattgttggtgcgttaggcgcgtataggcgttttgggatttcgggtataggcgggtatagaaggcgtagagtcgggcggcgtttgtttgtagtttttggggggggttttaggttagaagttttttgtagttgggttcgcggttggaggaggttgttgcgggcgggataggggttagtttattttttgtttggggttttagtttttttatttttttttcggaaggagataggttttttcgaggtagaagggagttgggaatgggtatgggtcgggtggaaacgggtttgttttacggttgttcgttggggtattggggacggggtattggaaagagggcgtttatcgtttatttgtttttggagttagtttttgaatattgttacgcgggtgtagatttcgggtttttttggtttttcgtagtcgtttttttaggaggtgatttcgaataggatttttttagggcgggggttaggtttagaataggttagggggtttttcgagttattttgcggggttaagagagaggacgttgtatttatttgttttttatgacgtttgttttacgtttggtaggtgtgagtttgttatttgtgtttattttagggatgaggatagagaggtttagagaagtcgagtgatagatagacgtggaaggaaaagaggtcgtagtggttttgggaaggtttagtcggtttttttttattagattgggtttatatttggtacgagttaacgtttttcgttaggtattcggcgtagagtatggtgttggggcgtagttcgggttttagggtttttcggtaggtgtcggtgttgagtaggggaatacgggttttttttattgttttagttttaggttcgtttgtagggaaggggtggaaggtttaggtttggagggtaagagtttcgttttgagggttttttttttattattttttttgatttttttttttttgaaagagtaggtagtatttttttaaggtaattcggtttttttatattttattatttcggatttttagttttttttattacgcgtcggtttatttacgtttagtattttcgaagagggcgttttagttcgcgatggcgtaggcggtttcggtagggggtttttggggtttttggggtaggtatacggggcgcgtcgattttttcgggtttatcggcgtttatagttgtattagggttaggtcgttgtggaaggttcgcgggttaaattgaggagggggaggcggcgtagggttaaggaagtacgggtgggggtgcggtgtttagttttgggggtttggggattgtttttttattttggggtggggtaggatgcggtttattggtatttttttcgtttgtttttttcgggatttttttgttagcgttatagtttatagaagtttattcggggcgttgcgggtcgagcggtagttgagacgtaggaaggataggggtatatttcgtaggtttttcggagattttgttttttcgttcgtatgtcgggttttttttatttgggggtacggagggcgggtcggggaggggtttcgttttagagggggcgaattcgttcggtcgtgttatttttttcgggttggtattttggcggggcgggcgcggcgttttgagatggggaagttcggggtcggtcgtcgttagggggtagtagagattatttttttcgcgcgtcgttcgtcggataattcggtaggtgcggggtttagcgtcggggattttagttgggtaaggtttgggggttttatttattttataaagtagtgcgttgtcgtgagtatttaggaggtcgttattaggacgtcgtcgtatagaggttgttcgtcgagttgtagttttattagttagggttaggtttcgggcggcgtcgcgttgttttttacgatgcggtcgtgggttcgcgttatattggtagtgttcggacgtttttcgtcgtacggttttagaaaggggtaaggggtgttacgagggatatgttttggttattttcgttttcgaggtttattcgg

SEQ ID NO: 11432 - DNA, 919 bp, synthetic construct
  misc_feature 1..919: note = Description of Artificial Sequence: Synthetic polynucleotide
  source 1..919: mol_type = other DNA
cggtggggtgtgaacgggcggaagtttcgtttagtgtttgtttaattatttttagtttgtggaggtcgagcgaatgcgggtgtggggttcgggtcggggtatatttacgcgttgcgttggtatcgggattggatgtagatgagtaggcgtaggtggtttcgggggcgcggcggtttttttttcggcggtttttcgagcgttgcgggggagggtgggacgtggttaagcgggcgggcggcggggtgggcgatagagcgggcgatttttttacgtttcgggttttatttacgtgtagcgtggcggcgagagcgtagaagttagttacgggcgttttgtattggtcgttggttaagtttaggttcgggtcgcggcggaaggtattttcggcgtcgggttgcgaggggtacggatggttatttcggttttcgttcggtcggatttattcgttttttcgcgcgtcggtatttattaggtagtagacgttaagttcgtgtagcgcgcgtcgttttattaacgcgtttcggcgtaggcggtagaggaaagcggtttttacgcgcggcgttcgcggtttcggggttaggggcgcggttagtagtgttagtacgttttttattacgtcgtcgtcgtttttttcggcggtggtcgagatcggggcgaggttcgtagcgatcggttcggcggggttatacgtatagggttcgggtttcgcgcgttttcgttgtcgtatcgtatttggtatagagcgagcggtggtcgcgcgttagggattttttattcgttcgtcgcgtgggtttagttttgaacgataggtgttagcgagattaggggtttgtcgggcgtaggggtggggcgagggcgacgttttttcggtttgaagggtttcggagtttttgcgttttgattttgtagcggttttcgt

SEQ ID NO: 11433 - DNA, 2488 bp, synthetic construct
  misc_feature 1..2488: note = Description of Artificial Sequence: Synthetic polynucleotide
  source 1..2488: mol_type = other DNA
cgggtcgagttcgaggttgttcggaggtttagggtttttatttcgcgatgttagttttgtttttttttgcgtttcgggtaagggtttgttcgtttgggggatcgtatttggaattcgcgtggttttttttttcggcggtgtcgtttttacggatagtgcgtgttcgggtttgggttggagcgacgttttcgagattattttattattttataattgtggttcgcgcgtcgttaggattcggttcggtgtgggttggcggagtataatgatcggcggcggggcgggggcgggtacgcgggcggcgggcgttgggggtcgcgtagatgtttgggtcgaataggtgagcgtttttcggatattcgggtgttcgtggggggcggggaggagggcggagggggtgtaaattaagtggtgggaaagagataaaggaagagtgaagagcgagacggtgcggatggggaagggggaggggcgcggaggggtagtcggtgggtagcgcgtcgaggagttcgagtttgaatttgattaagtattgggggttttgtcgtgggggtggggcgggggtacggtcgagagtcggttacgtgtttggtttttttagttcggggtttcgtttcggtcgttcgggggagtcgaatttcgaggttcggtagtttcgttttataagtattcgcgtttttggggattcgaaagacgtatgggggtcgaaggttgttcgaaggggtttcgggcgtcgagagtttttgagggtgtttgagttattttatttgggttaagttttttttttttggtttgatcgtagatagttcgtcgggtgttttttttttttagtttttatcggatttagagatcgtagttttcgggagcgatgggtaggtatagattttagcgtttttttttcgggtttagtttcgtgtaaggatttttttcgaagcgttttttttttaagagcgcgttttttatcgaagcgtacggcggcgcgtttagcgcgtttttatttttttttatttggtttagttttttttttttttttttttttttttttcgcgttttttttttttttttttttttttttttttttttgggtgtttttttttttttttttttttttttttcgtgtttattttttttttttattcgttttttcgttatttttttttgttgttttttttattttttttgtttgcgttttttttgcgtttttttttttttcgttttcgtttcgtgttcggtttcgttttttttttcgttttttcgtgttcggtgtttttttttttttttttcgggtcgcggcgtcgtcgtcgttgtcgtcgttgttcgtttgggttttttttttggttattttcgttttcgggtcgggtagtgacgcgtcgcggtggtgttagttttttttttcgggtagtcgcggcggtagtagtagtagtagtagttggagttgtggggttgttatcgtcgttcgtttcgtttattcgcggatttcgatcgtttattttcgtttcgtttttagtttaggtacggagttcggttcggatttcggcgatcgggtcgttttcggggttcgggtcgtcgtttttttttttcggttgttgtcgtcggtcgttgagttgcggttaggggggcgaggggttgggggcggttttggggaggggggcgtagggggagttttttttgtcggggttgagggagggggcgcgggggagcggttgcgttttgggtcgagtgggttggggcggggggcgggtgagtgtgttcgagagtggagggggggcgatgaaggttgtattgtgggggtcgcggggcgtttaagaggtgtgtttggttttgagcgtttagggtcgcggggcgtattttattttcggggtgcgcgtcgcgggttttggggggcggtgattgtgcgcgtagcgtcgcggtattgtgttacggtcgttcggtgtgtagcgggttcggtatcgcgtttcggcgagggaggcgttttttggcggcggggcgggggtcgggttcgggttgtcgcggtcgttacgagaagggaagtggattgtgtttggggatgtgaggacgggaagcgttgagtgttagggaggggtttttcggcgcggcgcggggagttgagacgcggtttgtagagttgagtttattttagtaggttcgggtttttttcgggaggggacggggtgttttttttaggtgtatcgtttgatcggaagtcgcgggcgttggcggtttttggcgaaggggttttttttaatgaggggatacggcggggcgggggtagtcggtcgtttcgagggcgcgcgtaggggttaagttggatttatattttcgtttttttttttttttttttattttgtttttaaggttggatattttggatagggaggaggggggagtgtaattcgtatttttattttagtcgttcgggagtagaagtgattttgtttttattcggagttgcgtttgttcgagttcggtcgtttttatcgggttgcgt

SEQ ID NO: 11434 - DNA, 513 bp, synthetic construct
  misc_feature 1..513: note = Description of Artificial Sequence: Synthetic polynucleotide
  source 1..513: mol_type = other DNA
cggtcgggtttgttacggggttttgtgtagttttttttattttttcggttgttagcgtttcgtttcgtttttttttagtttttaagggaggaggggagagttgtagagaggaggaggggtcggggaggtcggttttataaaggcggttggaataattttgttcgttagatttcgtcgttcggattttttgagttgttcgttattttacgtgatcgcgtcgttttttagttttatcgttgagtgagttggggcgcgtttttatttcgtttttagtttttcgtcgagtcgcgtggtgtattgaagtcggcgtggggaggagagtcgatgaaggagaacgttaatatgggggttttaggtagaatttttaatgggagagatttaggatttgagggagtcgggagattcgggagtttacggtttggtcggttattttttttttttttcgggcgcgaggtttatgagatcgtaagttattttttaagaatgcgcgtgtagtcgttgtcgtggtaacgt

SEQ ID NO: 11435 - DNA, 1766 bp, synthetic construct
  misc_feature 1..1766: note = Description of Artificial Sequence: Synthetic polynucleotide
  source 1..1766: mol_type = other DNA
cgttttttgtttattcgcgttaggtcggttttttttcggttttttttgtggcgcgagggatagcggaaattacggtagatagtatttttttgagtttaattttttttttttcggaggaagtcggttttttttttttatgttattttcgggttatttttggataatagttgttatttttatttgagtcgaagttaatttttcggggagttttcgggcgcgtataggtagttcggtttgttttgcgattgagttgcgggtcgcggtcggcgtcggtttttttaatggtaaatgtgtgtggttggaggcgagcgcgaggttttcggtaaaggtagtcgagtgtttgtagatcggggcgagttttgtgaaagtagataaaagaaaatatttattaacgtgttattacgaggggagcgttcggtcggggttgtcgtatttttcgcggaatatttggttttttttagtttcgagagaggagaagaagaaagcggaaaagaggtagatttacgtcgtttttagttaagtggatttgatcgatggtttttttgaatttattacgatatttgatttattagcgatgttttttggtttgtgtgttacgtatatatacgtgtatataaggttttggttcgtttttttttttcgtttttagtttttgggcgaattttatatttgttttaatttttcgtcgagggcgagtaggagcgagagtgtgtcgagtgagtgtgcgtttgtgtgtttcggcgagggtgcgcgttcggcgtcgggagcgcggttagtcgagttcggaggtatcgggaggtcgagagtcgtcgggattttagttttgcgtttattgtttcgttcggagttggatttcggggtcggggtcggggtcgtgcgtcggggataggtagggtcgggtcgcgggtcgcgcgttttttaggtcggaggtaaaagcgttagcgcgcggagggttcgaggagggtatcgcggttgggtttttcgcgtttcgggttttagtcgttcgcggttttcggttcgacgtttttcgtttcggagcgcgttcgttttttttgcgtggaggtcggcgggtaggcgagcggggggcggtagcgtcgtgttaaggggttggttggggtagcgtggtcggtcgggttggggcgatttaagagcggttcgggcggggtgcggagtcggattttggttggggcggcgcgcggggagggggtcgggggcggtggcggcggcgttggggggcggggaggaggtaggaggaggagtagtagcgttcgtcgggggatgtagtagcggtagcggcggcggcggcggcggtagcggtagcggcggcgcggagttttttgcgtttagcggttcggtcgggttgcggtagaggcggcggcggcgtttcgtttcgggtgaggttgtcggggtcgtgcgcgttggtgagtggggcgtggggggtaggtgggtggttgggggacgcggggttcgggcgggggttcgcggcggtcggagtttttttcggcgtgagttcggtcgcgagcgtcgtttaggtgagtcggggttggttcggatcgttcggttttagttttagcgttgtttgcggaggtgggttcgggcgggcgggagggaggtttcggcgtcggtcgttcgtagagggatgatttgtttgatttcgttggttggcgggcgggcgaggatttttcgtcgcgtttttgattcgcggatacggtatatcgagtataggcggtttcgggtaggggagcgcgtttgggtcggttattcgt

SEQ ID NO: 11436 - DNA, 6511 bp, synthetic construct
  misc_feature 1..6511: note = Description of Artificial Sequence: Synthetic polynucleotide
  source 1..6511: mol_type = other DNA
cgtagggtgaataggttcggttaggagtcgtagcgtcgtttatttgtatttcgtttatttggtgaggtatgtcgtggagttttaggttttcggttaggttcgcggtatttagggcgtgtgcgtggggtagtagtaggtcggagcggcggtaggtatttttgcgggcgtttatcgcgttcgtttttagttcggagaggtggggtagtaggtcggtcgggcgttcgtggtgcgagggtagtttcgtttttttttggttttggcggtcgggttaggtttgttgttggttgtttgtgggcgtcggttggtgtagggggttgatggcggcggcgtacgttttttttagatgcgagtaggggtcggtcgattgggagtaggttagttgttggtagggagggggaaagtagggtggcggttgatattcggcgattttagtgtgggagaggggtggcgcggggttgtagaggtgttgttcggcggaggagaggtgggggattcgcggatttttattgttgttttcgtcgtggcgattttggagggaaaaaaaaaaataggagatttcgttagtgcgaaatttcgttattgcgaattggtcggtatcgtcgggttacgtagagggtttcgggggattaatcgtatttcgttcggcggggtttgtttagggtcggaaggtattcgggggtaatgcgtttcgaggatttcgttgtaagtaaagagtgcggggagggaggagagtttggtgaaagatttgggggaacgagtttttaaagttcggcggcgaaggtttaggcgttgtttttaagttcgaggcgtttggaggcgttaagttcgaattttgggttttgggttagaaaagttcgtggtcggagttcggggcgaaggagttagagttcggggcgaaggagtcggacgttcggtgtagagttatttcgtggagttcgtttatgacgtagggattgttggaggtggtagcgcggtaggcgcggatagagtgcgcggcgcgggaaatgcgtatttttttcgttttcgggatttttttttttacgttttcgggataaagattttcgagcgggcggcgttcggaaagtagggttcgttattttgcgtcgttttgggaagtgaagagggagcgcgcgtatagggcggttttttttgttggtcgggtttagtcgaggggagtaataagtgggggcgttttgtattgttaagggtagtgttttcgtacgtcggggcgtagagggggtatgaagaattttggaaattgggtagttttgttcgcgtacgttttttcgtttttgggcggttcgatttagtttttaaaggatgcgtttttatttgtttaggggtttcggggcgtcgggaatttggaggaatatggcgttgtcgttttttggcggaagcgttcgggtttgcgggtaggggtagttttttagggttcggaggcgtagtgaattttcgcgagttcgtagttcgagtttcgcgttttcggcgtttttgagttcgtttagcgttgtttgcgtttttttttttttttcgttcgtcgtttttttttttttttttatttttcgaaattttagtttaatttgttcgataggttggagtattcgcgagtttttacggttttatttggtttcgggtatttttattattattttttagtttttattttttttgaaagttaaatttcggttgttttcgtgttttttcgaggaggtagcggggtaggtgataagtcggttttggaggagtgttcgttaaggtgtcgttagtaggtagttttatttgatttttttggatagagatttcgtgcgtaaaagttacgtttgagggttgtagacggggtattttttcgagaaaacgggaagtagggttgtttgtcgtttaggaaagcgttcggtaagttgtgtgggtgggatttgttattttttttttaggtttcgttttcgaggggaggttatttaggaaaaggttttatataggaaaggggtttcgtagaaatggattaaggggtgttcggagaagtggatttcgttttatcgagaggttagggtttttatgttttcgttttcgatttcggtttagtggtttttgtttttcggattgttttcggcggggcggggttgtatttcggagttttagtttatttcgtagtttttttcgtatttgatattatcggttattttttataatatggcgttcggcgttttttaaaatagtcgttagttaaatttaggatttttttagtttttaagcggtaaatttaaaatcggggttacggtgattaggcgtttgtcgtcgttttcgtcgcgcgcgggttttgttgttcgggttattggatacgtatcggcggttttgcgagcgtagatgttgtcgtcgcgagtgttaagatcgtttcgcggacggggaaagtcgcgttcgaatagtgtgttttggcgatagtcgggggattcgagcgttttaatgagaaggaaattattataattttttttcgggggtcggcgcggaggtttaggcgtcgggcggggcggtttttagttagttttagtttagtttcgtttcgtattcgggtttggcgtagcgtcgagttttacgttgtgagggacgaagcgcggagttagtgggcggtgtttcgttgatagtcgaagatttgcgaggtttgggtttttcgacgcgttttttttttgttatttttatcgtaaatatatttgagattggtagagttgggggaagggatttaaatattgaaatttatttttttttcgtttaaacggtttttattcgtttttttaaaagacggatgttatttggagttaagaaattgcgtatttggggagcgatttaataatcggggtttttttattttttaaaaatatattttattttatttatattttattgaggtttaaggtttgagttgggattatgtagttggagttttagtgcgttagagacgtttagtttttttcgtgggtatagcgcggtttcggttttcgggcgggaggagagaggaagggatttttggggagtttgttttaagggtcgtagaggtagtagacggttttattcgtttaggagttgcggatagcggcgtttcgtcgttgtcgttcgaagtggtatttttcgcggttggttgaggttagggggaattcgcgcgtattggattagtttagcggttcggttttgttttgttttgcggaacgtcggttttgtagttgtttttggcgggtcggttatttagaagtttttattcgttttgggaaagaagcgtcgggtaggaataaaattcgagcgttacgggtaaggtgagggtgaggaggtgtaggaagttgggagagagtttgtagagagttttcgattggagaggtagatatttaggttttatatgtttagatagaaaacgaaatttttttttatataaacgttgtttttttttttttttcggtatttgttatttaaatttgaaagtaaagtgtaatattaatttttaaaatttaaattaacgaaattttttggtttagttattatgtagtaattgatttttattgtaaggggaatatcgttaattttcgagggcgtatttgttgggacgttttaattggttttttgggttggatttaaatattttgtggggattagaggataagattatttttatttgatattgaatacgattttgtaataattaatgtttattagtacggtgttcgtatttgtagtagatatgatttttttatttacggaatggcggtatttattgtttcgttgttttttttcgggttcgtttgaattttagtatttatttagatttaggtgggtttaaaagaaaataataataataggcgttttttaagggaaattttttttcggttttagatagtagttaaattttaggtgatttttcgatcggacgcgggaataaaatttggaagttgaaattattgagatttttcggttaagtatatttgtagggttttgtattaaggagaatagtgtataaaaagatatataggattttgatatttcggttttaaaataggtttttgggggtaaaataagttatcgtagaagtagcgtttttggtattagcggcgggggagggggatatttgttagaagtagaaattagatttaggttcgtaggtattttagagtataggtttaggaagatgggttttagattcgttagaggtgcggcgtttttttcgggcgtttgggattttttgacgggtgtcgttgggttgttcgatattttgggttttttagttttcggttttattttttgattcggtttgaggtgtagtttgaataagttgttttgtttgtgttggtaagtttattttttgtacgttggggttcggaatgggtaagaaggtgtttattttttattttaggttttggttttttttttttatagtaatattagttaaagttgttcggaggaatcgatatgttttttcgtttgggagcgtttacgtaggaggcgaagggagtcgatgggtattgagggttcgcgtagtatcgtgtcgtgggtttaaaggatttagaggattcggaatcgtttggtaaaggttatttatttttaaggagtttttttggatttcggcgttgttttttttttaatgggtaagcgttcgaattggagcgtaattttcgcgttttttgtacggaaggtagttagaataaattttttgttttttcggtacgggagatttttttttaatacgtatattttcggtttttgggtcggtatttaggtacgcgcgcgtttttgtgaggaagttttaatttttttttgattttaatttttttgtttagtagagtcgggaatcgaaggttttagtatttaagatagtttttttttaacgttttcgttttttgtttacgtgaagacgcggattgcgtggtcgcgtttaagatagtcggtatcggtagaaggggatttttttggaatttcggaggtttcgtagtcgtttggagaagaggatggaaggttgtcgggggtttttttttatcgttttttagggagtttaaatttatttattttttggaagttttggatttacgtttttatgaaatcgtaaattaggtttttgtaatagcgggagcgttttaatagcgcgttatttttaaagaggcgcgaggtggtgtttttggaaatagggttttcggttttaggtttgagttattcgttatttttgtttttattttagacggaagaaggcggttaggcgggtagagtaagattcgggtagatttgcgattttttttttcgttttagggaggggattttcgagtagaagatggaggttttcgagcgttttcgtagatttcgcgttacgcgtcggacgtttgtttcgtttttcgggataacgtgagcgtcggtagggattttagtaagtggtagattcgttaggattaagtaaggtggaaaggtcggggtttgcggtaaatttaggaggagggggtatttacgttcgttatttttttttcgcggtattggtatttattggatcgatattggcgttaaagggtattttgaagtatttatgtttagtaagggtatgttttggggtattatagatattaagttatagttattttaaaataattataaaaatgattatcgtaaataatagattgttttaatagggcgcgaagcggtcgtcgtatatagacgtttttggttttagttttattagatttagtttattgttcgtttttttgcgtttcgcgttaggtcgtatgtttttcgtttagaattttttgagttttaatttttttttttaaataatttttttttttaaataggtaaagtgaggcgaggagttgaggggtttataggtttttaagttttcgaggagggttcgggtttacgttagtttcggttcgttaaacgagatttcgtgggtatagtttttaatttgataattatttgttttattttatagtaggtaaaagtgaatttttagtcgtttaattatttgaaagttataaaggtgtttagggttgaaggttatttttttagcggttttattagggagttcgttagagatatgtttgattttttttttgttttgtttcgggggggattttcgttcgtcggaggttttatacgtttggtcgtgggatggtagatttttgttatttttttattaatatttcggagtttattcgtacgtattttaatcgttcggagcgtaggttcgaggattaaggcggtagtttcgtgttttttgaggtttttttcgtttcgtgttttgggtcgttatatatttttcggttaagttcggcgtttttaatttagaatttggtcgtttttaggcgtggagtaggttattgttgttagacgttgcgcggattcgtttttttgcgttagtattgggcgataggtagttcgggtagtatttaggagttattttgtacggttttaggcgttcgttttatttagcgttatttttcgtttttcgtagcgagttttttcgtagttttttttttttgttagttttcggggtcgt

SEQ ID NO: 11437 - DNA, 6511 bp, synthetic construct; identical to SEQ ID NO: 11436
  misc_feature 1..6511: note = Description of Artificial Sequence: Synthetic polynucleotide
  source 1..6511: mol_type = other DNA

SEQ ID NO: 11438 - DNA, 338 bp, synthetic construct
  misc_feature 1..338: note = Description of Artificial Sequence: Synthetic polynucleotide
  source 1..338: mol_type = other DNA
cggaaatttttaattcgcgatttcggcgggtgtatcgtcgagtttttcgggaagtgtagttttagcgcgagcgggacgttgggaaatgtagttttgcgcgtttacgttttcgatcgggtcgtgttcgtcgcggttttgcgaggttcgaggggtaagggagcgtgtagcgggggcgggattacgaggcggcggggttgggggcggtttttgtgtttgcgtcggggatcgcggtgatttcgttgcggatcggttcgcggtgattttagcgcgaacgagttggttgtcggttggggcgagaaaggtttgcggatcggtttgggcgtatgcgcggaaggcgg

SEQ ID NO: 11439 - DNA, 936 bp, synthetic construct
  misc_feature 1..936: note = Description of Artificial Sequence: Synthetic polynucleotide
  source 1..936: mol_type = other DNA
cgtaggcgcggggtgttttgagttttttaatttttagagggaaggagtttatcgtgggggatcggttaaagttttattttttgttcggtttagggtaaatcggtttttcggtagtttagttcgtttagtttttttcgagaggatataggggattcggagttcgtaggggttagtattatttttcgtttcgggtttcgttttttatttttcgtcgtttcgagacgtttcgatttttagttcggaggtgagggtttttttttatgtacgggcgtttgatgggggtaggggtggggacgtacgagagttttaggtttcggttcggatcgttcggggttttaacgtttttttttcgggtttaggaatagcgttttcgtaggaagtatttgtttcggagggggttttcgggatgtatttcgtcgtgttcgcgttcgatgttcgtttttttagggtttcgcgatttttggggatttttcgtttttcggtttagggggtatttatttcgtacgtggagttcgggtagcgtttttagacgtatttagcgggatatcggagaggacgtcgacgtagtgtaacgtttcggtcgaagcgtcgaataatatgcgcgcgtcgcggaggaggtgcggggcgtgttcgtttaggtagcgggtcgtttcgacgtggtagaagtttaggaagtcgtagttcgcgaaggataagttttagtcgcgttttgcgtcgtatatggcggcggcggcggggcgggggcgcgggttaggatttgggtcgggatcgggaatcggttcgggttttgattcgtagtagtttcgttcggcgttcgtaagcgttttttattttgttttagtgtttcggttagggtatttttagcgcgacgttagtttcgtttttttcggattatgtaaatgagtcggcgggaggtttaatgagcgggtaggacgt

SEQ ID NO: 11440 - DNA, 2184 bp, synthetic construct
  misc_feature 1..2184: note = Description of Artificial Sequence: Synthetic polynucleotide
  source 1..2184: mol_type = other DNA
cgttacgacggggattttattacgttgttttttatttacgttattcgtttaatttacgcggagggttttgagggttttattacgtagttttgaaggggtagagttggggttatataggtatcggaagtttacgttgtggttttaggagaaggttttggatgtggtttttatgagtgaagggtggatttatagcgttgtcggaataaagggaaattataggtaggagggaagcgcgtttaggattcgcggttatcggttttttagattgttttttggggttaggtcgcgaggagatggaaagcgggggtattataggttcgtttgaattcgcgcgtttattcggttatatcgattttaaatttttgtatgcgggtaggatttttggtttttttgcgtttattttagttttgttggtcgtcggggtatttgagggatggttgcggggggtcggagggtggaaggggcgtcgggtagtttcggtggggaggggaagaggtttttcgtgtattatggattttcgtattcgggaagggaggcgttcggggttggggagggaggaaaaggcggttgtgttcggggagggggtagcgagatttcgttcgggttacgggttgtaggatggagcggacgggaggaaggagttttgacgtcgcggattttacgtttgtcggtcgttttttttttttttgttttttttttttttttttttttcgtagaggtagcgcggggattcggtcggggtggggttagggcggtgcgtttcggagtttttaatttggattttatttcggaggcgtcgcgatcgcgttttcgtcgtttttaggaaggtgttcggatcgcgtcggcgatcggaggattttgcgtttcgtcgttttttattttgtttcgtttcgcgtttgtcggcgatttcgcggggtcggttttcgtttttatttgtagttcggggcgcggcgtttttgagggaagcggggttttgggatttttcggtttgggcgtgggatattttacggttcgtacgaattttggtggttcgggtttttgtttttttagaatagcgtttaggtttcggagaaatttttcgaagtcgtgggtttagacgttttcgggggatttcggtgggacgggtagggcgggcgtcgcgggcgaggggacgcgtattgttttcgggcgaattagaaatattttatatcgggtatttttttaggaatcgtttatttatttttattgttttttattaggttttattttattattttttttttaggtatttttttcgttgtatcgtttttacgcgggtatcgtttttattcgggtatttcggttttgttttgttttggggtggtcgtagttcgcggggaggaagcgcggcgaggcgtttatatcgggaaagtgttttcgtgattttgcgaggttatatttcgggtgcgtcgttgcgggttcgtgggttcgtgggttgtagtttttcgtttttgtcgggtggacgagtttcgggttcgcgtggagttgttcggttaaggtcggttcgggaggggcgcggcgtagggcgggtaggggcggggttttaggttaacgtttagttttagatttagtttcgtcgtcggatttatcgtgtttttgtttttttatttttgagaaatcggaacgtcggcggtattttttttttcgggtcggagtttgcgtttttcggattgcgcgtttttgtttaggcggcggtcgggggtgggagcgcgtagcgggttaatttttttaaagggaattgtcgggagggcgtttagaagggaaagattaggaagcgttgggtgttgagttggagtttggtttttttttgggggatcggggagggggttgaaggtggggagaagatcgtcggggttgttaggggggtattgagggagcgtttagggggagaattttgggtgggcgacgtcgtaggggagttgtttggtaggggcgagggtttcggggaagtggagtttttggtcgagagttgtatttgtggtcggggagggaaagggttataagggtagtgcgcgtcgggagggaagtttaggtcggggggaagggattgcgcggcggggataggtgcgtcgggtgttggatagtgagtaggagttcgtcggtgtttaggttacgaaggtgttggagtcgggggagttggaacgtaagggggttaagggaacgcgt

SEQ ID NO: 11441 - DNA, 413 bp, synthetic construct
  misc_feature 1..413: note = Description of Artificial Sequence: Synthetic polynucleotide
  source 1..413: mol_type = other DNA
cggtttgacggcggggtcgagtaggggaagtggaaggatggagggagaaagggagagagttttagtcgtttcggttgtggtaggaggagttttaagagcgtttttcgagttcgtttcgtatttttaggtttagttcggcgtaggttttttttttcgttttttttattttcgttagttgttgaaatttttttatcgttttttcgcgggtaatagtgttcgttaggcgtcgtcgcgcggtgtttcgttttttacgtcgttcgttcggaaagagttcgtagtggttcggggcgtcgcgttttgatcgacgtttttggggtttgggagggcggcgttgagagttgggagaggcgttgagtttttcggtttttacgggacgtcgggaaaggagagcgagcgtaatttttacgtttcgg

SEQ ID NO: 11442 - DNA, 403 bp, synthetic construct
  misc_feature 1..403: note = Description of Artificial Sequence: Synthetic polynucleotide
  source 1..403: mol_type = other DNA
cggttcgcgtcgtcgtgttttttattcggttatatagcgattttaaaagtttagtttttatttcgcggagatttcgatagttttgggaggttttttttaaaagggaatttggagaaatttgttgttgagtacgattgagttttattttataaaatatttattatttcgtcgttattttttaagtttacgtttttaaatatgcgaattttaaggtttagttcgggagtaagttaattttaggattcggtttatcggcgcgtgttttgaaaagaatgtcggaggttagatttttttttatcgtttagaggtttcggtttagcgtatatatttggggttcgtagggttttcgcgcgtcggaattcgatttgcgttggattttttttcgggcgtaggagttaagcga

SEQ ID NO: 11443 - DNA, 675 bp, synthetic construct
  misc_feature 1..675: note = Description of Artificial Sequence: Synthetic polynucleotide
  source 1..675: mol_type = other DNA
cgttttatcgtattttagtggagtgtcgcgaagttgtaattcggttttaaggcggttcgtatttttattcgtatataaaggtaggtcgtagtttcgtacgcggggatagggttagtaaggggcggggattttcggggtcgtcgttttcgtagtttcgcgtgtgggattttggggcgggtcgttattttgtggtgcggtcgtcgtttgttaggagatatttagtaatttcgtagcggttattttttataagaaattttcgttgtaatcgttgcgttatattatcgcgttttttagggataggaaagttttttcgtgtttggtgaagttttaggggaagtagttattttgtcgtcgtatacggtaaaattttttattgtcgtagtcgttcggttgacgtgataagggaggtgtaggttaatacggcgatttcgcgttttttggcggtagtgtcggagtagcggcgttgtttttgatttattcggtattcggttttcgggatcgtttggcggttgtgaatgtagagttggggcgacgtggggttcgttttttgggattgggtgtgagtttgcgtagtgagttatatgggggttatggtttggcgtgggggcgtggtcgggtggggtcgttggatttggtgttggaaagttagggaagtagtcgtgcgtttaagaacgg

SEQ ID NO: 11444 - DNA, 580 bp, synthetic construct
  misc_feature 1..580: note = Description of Artificial Sequence: Synthetic polynucleotide
  source 1..580: mol_type = other DNA
cgaagagttcggttaataaagtaaacgtttcgttttcggttttttttttttttgtaggggaaacgaattgaacgtttgaaacgaaggtggcgcggtttggataaatttgatttttcgatatttttcgtttttgcgttcgttttcgttaagcggggaggagcgatcgttataatggattttttcgtaggttttgtgcgcgttgggaatttagttgtcgtcgtttcgtagagttttttgttttcggagggcgtttattttcgggtcgtttattattcgcgtagtatcggtagtcgttgtttcggtagtttttagtcgtttcgttcgtttgtggttaattggttttagttatttttcgaaatgttagtcgattttattgggtattggaagatgttggttaacgagaatttcgaggagtatttgcgcgttttcggtaagcgttgttcgttgcgttttgggcgtttcgtcgagtagtttcgggtcgttttttagagttttttcgagacgttgtttgtttgtttttatttcggcgagtcgcggttcggtgttttcggacgttagaaagggcgttttcggttatcgt

SEQ ID NO: 11445 - DNA, 858 bp, synthetic construct
  misc_feature 1..858: note = Description of Artificial Sequence: Synthetic polynucleotide
  source 1..858: mol_type = other DNA
cgggaatatcgttttttcgttagattttcggcggtttttttttttttttttaaatttatttttaaagttaagtgtaggttttttcgttttagttagaagcgttgcgtgagtttttatacgtagtcgtaggtagttttttaaatagcgttcgcgttgagtaaatagtttagacgtggggtttaggagggcgagttgaggcgatcgtatcgggcgcgtagcggcggcgggttagtcggcggttaatagttagggcgcggttcgtttcgtcgttttttttcggggagtttataaggttttcgtagcgtttcgggcgtttgttgtttcgtgtttttatcgacgattttatttagttgcgttacgcgtcgtttcggttgtcggtcgcgcgttttgttcgtcggttttcgttcgtaatcggcggtttagggcggattcgggtttttgcgttttcgcgagaagcgcggcgttgcggggtcgtgggcgtttgagttcgcgcggttttcgagggtcgaatatggggggatgtacggtgaagttttagttgttgtttttggcgttcgttttttatttttggaatttttgtttgggtgcggattcggagaagttttcgagtatttttataggtgagtatttcgcggttcgtcgttgtttcgcgaggttcggtcggcgggggggtagtttatttatttattagttttttcgcggggttggttaggtgagtagtgggggtttgttttttttttttaggatcgtcggggttttttttagaattgcggtcgggcggcgttggtttttggggaagtgtaggggtattcgttttcgttgattttttggagttttcggtgaatttagcgtgttcga

SEQ ID NO: 11446 - DNA, 5715 bp, synthetic construct
  misc_feature 1..5715: note = Description of Artificial Sequence: Synthetic polynucleotide
  source 1..5715: mol_type = other DNA
cgttcgtatcgcgtatataggtagtggacgttcgtttatttgttcgtttgttgggcgtagggcgtttttggggtggggagggcgtttttgtggggggaaaaggggcgtttttgtttcggagggggaaaggacgtttttgtggaaggaagggggggtttttgaagcggtgtggtgagaggacgttttcgaggaaggaagggggtgtttttgtagcggtggggggagaggacgtttttgcggaaggaaggcggcgtttttgcgggggttggagagacgttcgcgcggtttttcggtttagggatcgttggttcgcgggttcgtttttttttcggcgttatggaaatcgtatttttttcgtttgtcgttttcgattttttttttttattattttttaaacgcgattttaatttttcgataagttgataagtgaatggcgtagaggacgtttcgtaaagcgttcgcgagcgggtgggatataggcgtttttttcgcgtttttttgttttttacggaagggcgcgcgtcgttttcgatttggagcgcggtgttcgcgaattcgcggtcgcgggttttggaattttttcgcgtttcgcggttgcggggggacggagatgcggtcgggagacggggacgggaaacgggggacggggatggggcgcgtttatttcgagcgcgggagcggtcgttttcgtttaaaatggggatttcgcgtttcgagagtacggttcggttcgtcgtttatgtttttattgtaaggtcgtagttttcgtcgtcgatttcgatttttcgtttcgtttagtcgcggtttcgttcggcgtttttttttcggtggaagtttaagtttaattaattgagttcgaggcgggagggaagggttttgcgcgtcgtggttcgtttcgtttttttttcgcgttttttttttcgttttgggtggtatttttttcgtcggtatttataataagtcgttgattaatgaggtcggggtcgttttatttcgttcggtcgggtcggggttttcgcgggagggggaggggacggcgggaaacgcggttcggggagaaaggggggcggggcgggggcgcgcggttcgttttcgcgagcgtcgcgtcgattggtcgagcgcgtcgttcgtcggggggcgcggcgttaatgcgaggtagcggggcggggcggtcgcgttgtgtgtgtttgcgtaacgtcgagttatatgttgttttgttttttttagtttagttattcggtgcgcgatgtgttatttattgtgcggcggggatcgcgacgagttcgggtcgtcgttggtagtagtagtagtaatattagtagtagtagtagtttcggcggcggcgcggatttcgagcgttcgggcgtatttcggtttttcggagcgcgacgcggcggtagtagtttcggtgcggtcgcgcgcgttttaggttcggtttcgcggttcggggatttcgattttcggtttagcgagcgcgtttttcggcgtcgttcgagagttcgaggaggtagcggtcgtaggtagtcggggaggggggcggttatcgttcgcgtcgggtatttttaggagttttagagcgcggagggcgcggcgtcgtcgagcggtgttggttttcgcgggttttttcggattttttttatcgtttgggttcgagggacgcgtgatcgggcgggcggtcgggcgtaagggtgggagggagtcgttttcgttcgcgtttttttcgtttttcgttttaatttttgggcgtcgggttcgggtcgcgcggtttgaagcgttcgcgatggcgagttcgtcgcggtacgggtcgttcgggtcggcgagcggagacggttttaattttaataataataataataataataattatagcgtgcgtaagtgcggttatttgcgtaagtagaagtatggttataagcgttttttcgtgttgcgcggattcggcgcgggcggcgacgaggcgacggcgggcggggggtcggcgtcgtaatcgtcgcggttcgagtattacgagagcgagaaaaagtggcggagtaaggtaggcgcgtcgaaacgggtgatcgttttcgattgttgtttgaatattaataagcgcgtcgacgttaagtataagtatttgatcgttttttatattaaggacgagtatttcgtcgtggtcgtcgagaacgagtaggagtaggagggttggtatcgcgcgtttatcgatttggttagcgagggtcgcgcggtcgtcggagacgcgtttttcgtcgtcgcgttcgtcgcgttttgtagcgtttttttgttcggcgttttgggcggttttgtcggcgtcgtcggggtcgaggatagttacgggttggtggttttcgttacggtcgtttatcgtgaggtgtggtaggtgaatttgaagtttaagggtttgggttagagtaagaatttgacgggggtgtatcgtttgtgtttgtttgcgcgtattatcggtttcgtgaagtttaattgcgagtagtcgtcggtgacgttgtagtttatgaatattcgtcgttgcggttattcggatagttttttttttatcgaggtgggtcgttcggtcgttataggtttcggcgagttgtggatgtaggcggacgattcggtggtggcgtagaatatttacgagattattttggaggttatgaaggcgtttaaggagtttttcgagtttcggtcgcgtagtaagagttaatcgtcggggtcgtcggttacgtattttattagcgttttcggcgcgcgtcgttattattatttggttaatttgttttttagttagacgggtttggtgcgtcgttcgcgtatcgatagtttggtcgttatttcgtcggcggttaagtgtagttcgtgtcgggtgcgtatcgttagcgagggcgacggcggcgcggcggcgggagcggcggtcgcgggcgttaggtcggtgtcggtggttgggagttttttgagtttcgggtcggtgcgcgcgtttttgagtcgttcgtatattttgagcggcggttgcggcggtcgcgggagtaaggtggcgttgttgtcggtagggggcgcgttgtaatatagtcgttttatgtttatgttcgtggcgtattcgtcgttcgtcgttattagtttcggttttttgtcgtttagtagcggttacggttcgggtttttattcgtcgtcgttcggttcgtattcgtttttgtcgtattcgttgtattacggtttcggttagcggttttttagcggtagcgttttcgtttcgggtttttttagcgatttcggttttatgtttttggacgagtacggttttagtttaggcgatttgcgcgttttttgtagttatcgaagtaatacgttcgagtttatcgcggagacgttttcggttcgagacggcggcggcggcggtgagttttacgggtatatgattatggataggtttttgagttattgtggtcgtttttatcgtcgggtttcgggggacgcggtttaggatttggatcgagggttgcgtaagaggatttattttttgattacgttagttcggtagcggtcggtgttttagtttttttttgtttcgttggatgaatatattttgatgcgggttattttttcgggtagcgcgggtcgtttttgttcgttttgtttcgcgtttttttttaaggtggtttattatttttatttagaggattacggagatatcgagatcggtttttataggagttttagtagtaatttgggggtagacgacggttatatgtttatgacgttcggcgcggttttcgcgggtagtgggagcggtagttgtaggagcgacgattatatgtttatgagtttcgttagcgtgttcgtttttaagtagattttgtagtttagggtcgtcgtcgtcgtcgtcgtcgtcgtgttttttgcggggtttgcggggttagtatttatttttgcggcgggtaggatattttcggcgagcgggggcggttataaggttagttcgttcgtcgagagttttttcgaggatagtgggtatatgcgtatgtggtgcggttttaagttgtttatggagtatgtagatggtaagttgttgtttaacggggattattttaacgtgttttttagcgacgcggttattacgggtatttcgttcgatttttttttcgtagttttgtatttcggcggggagtcgtttaggggcgttttcggttgttgttatagttttttgtttcgtttttataaggttttttatatttgtggcggggatagcgattagtacgtgtttatgagttttttcgtggggcgtattttggaggaggagcgtttggagttttaggttacgttagggtttagttaggcggttagcgttttcggggtcggttttacgtagtttttttattttgtagtgttttcgttcgtgcggtttagcggcggtcgttcggagggttttttgggttagcgcggtcgggcggtgaggtttacgcgtttgtttttggaggggttgtttagtttgtttagtatgtacgagtatttattgttatcggagtttaagagtttcggcgagtatattaatatcgattttggcgagttcggggttcgtttgtcgtcgttcgcgttttttttgttggcgtcggcggtttcgtttttttcgtttttgttcgttagtagttcggtttcgtcgttgggtttaggtatttcgggtattagtagcgatagtcggtagcggttttcgtttttcgattatatgaatttcgattttagtttttttaagttttttaagtcgggcgtttcgagcggttatttcgtgggttttttggacggttttttgtttttcgaggtttttttttcgtattcgtcgttgttttcgcgttcgttcgcgttttcgtcgtcgtttttgtagtcgtcgttatcgtcgtcggtttcgggggagttgtatcgtttgtttttcgtttcggtcgttgttatcgtttagggttcgggcgtcgttttatcgttgttttcggatatcggggataatggtgattatatcgagatggtttttggtgtggtcgttatttcgtcgtaatttatcgcggttttttcgaagttagaagttgttcgcgtggttagttcgacgtcgggcgtgaagaggttgagttttatggagtaggtgtcgggagtcgaggtttttttgtaggttagttagttttcggatttttatcgcggcgttaaggttattcgcgtagattcgtaggggggtcgtcgtcgttatagtttcgagatttttttttttattacgacggttattttcgtgttttcgtttttcgtttataattttaagcgttataattcggttttcgtggaaaatgttttttttaggaaaagtagcgagggcggcgtgggtgtcggttttggagggggcgacgagtcgtttatttttttacgatagttgtagtcggcgttttttttggtatcgtagggtcggtcgtggatttcgggttagttcgggggtttggtcggttgttttgggagcggtggatcgtttatgcgtagagagatttttgtcggtttttagaatggttttaattatatcgttatcgacgtgagggaggagttcgggttgttattttagtcgtagtcgtcgtcgtcgtcgtttttttagtcgggagataagagtttttggggtcggattcgaagtttcgggggttttattagcgttgtgggcgtcggtagtatcggcggcgggtgcggggggtcgggtttcgg

SEQ ID NO: 11447 - DNA, 858 bp, synthetic construct; identical to SEQ ID NO: 11445
  misc_feature 1..858: note = Description of Artificial Sequence: Synthetic polynucleotide
  source 1..858: mol_type = other DNA

SEQ ID NO: 11448 - DNA, 247 bp, synthetic construct
  misc_feature 1..247: note = Description of Artificial Sequence: Synthetic polynucleotide
  source 1..247: mol_type = other DNA
cgggtattgtttgtcgttagtataacgaagaaatttatatttacgaagattttagattttacgtgattatattatttaattattagcgttggtttggaggaattcgttgttacgtgatcgttcgtgtttaatgatcgaggtttacgttttttagatcgttatagtcgttgttatagggtttgagtttgggcggcgtttcgtttcggtcgtacggtgcgtcggcgttaatttttttcgaaggtttcgg

SEQ ID NO: 11449 - DNA, 224 bp, synthetic construct
  misc_feature 1..224: note = Description of Artificial Sequence: Synthetic polynucleotide
  source 1..224: mol_type = other DNA
cgtcgttaagaaggaggaggagcggtaggaggcgttgcgttaggcggaggaggagcgtaaggttaagtacgttaagatggaggcggagcgcgaggtcgtgcgttagggtattcgagataaggtgcgcgtcgggtcggtttcgtttgcgggaaggcggttttgagtttagcggggatttagatttcgtttgggtggaaggggttgttcggaagaggggcgggcgt

SEQ ID NO: 11450 - DNA, 1174 bp, synthetic construct
  misc_feature 1..1174: note = Description of Artificial Sequence: Synthetic polynucleotide
  source 1..1174: mol_type = other DNA
cgatgtggcggggtttgggaaatgcgttcgttggagtatatcgtagtttcgcgggttttcgagcggcgcgcgcgggtcgaggatttttagggtttttcgcgggtttttcgagcgtcgtcgtatcgtttttgttcgcgttcgggatcgtttcgtgggtttttttgttagggtcgtttgcgtcgagaggtagtttaggttttgtcggggacgtacgggttttatttttgattttttagtcggagttttttgaggatttgtaagtatataggttggagtcgagaggttaaattaggttttaggggatttttttaataaaattttaaattttatttaggttgttcgtaggttaagcgattgtaaggattttgagtcgaagtagcggtgtcgggtcgattcgaggttcgttttttatcgtttttttttcgggtcggttttgtgtagttggggttttggaattcggtttttttcgggttgtcggttttggggtttggtgttcgttatttttttttttcggaggtcgttattgtttttttattttatttttagttttttcgtttttttttacgtttttttttcgcgtttttttttatttgaattttttttttttttcggttggaagaaaagtcggtaatgagaaattagtttagtgttagtcggaggaggggggtagataattttagagatatacggtaatggagagagaatttattttgtgtaaagagggtttcgagttattagggaatttttggattgttttaggttgtcgtgtgtgatgtttattacgtcgtgcgaatattatttgttcggtattgtgtttttagttgttaggttatttgttgtacgtagtaatatttgattgtttggttttacgttcgtagcgttcgtttagacgcgcggggcgggggtcgcggaggggcgggcgggagttttgattaagttatttgcgaggggagggggcgcgggcgtagcggcggtcgggtacgaggtcgggttgatattattatttgttggggcgcgggaagaacggtagttgttttgcgttgtttcggcgagggacgtttggaaaaggttgaagttttgggcgtttttaagttcgttatttacggggttttcgttattttagtttgttcgtcgtcggtcgttttttgtgattttttgttttttggttcgtcgt

SEQ ID NO: 11451 - DNA, 8657 bp, synthetic construct
  misc_feature 1..8657: note = Description of Artificial Sequence: Synthetic polynucleotide
  source 1..8657: mol_type = other DNA
cgagacgcgtcgattttttcgggaagcgcgagcgcgcgcgtgtttgcgtttttgtgcggatttgggtttgtcgtgcgcgtgtgtgtaaaggtgaaacggcggcggagttttaaatattttattttcgaattattttttgttgaggaattaaggttgttaggtcgttgttgattttgaagagggttttttttaattgcgatttttttaaggaattcggttttgtttatttttaaggaatgttttttttttttattttttagacgttgtaggtttttcgcgttgcgtttttttttaggttggagtcgtagttggcgggacgcgtcgtttttacggtatgtcgggtgagagtcgtttacgagcggtttagcgtggcggatttcggttttgagtcgcgcggacgtttggttacgaggggttttcgattcgggcggggagaggtgcgatttggggggagggggcggggcgcgtaggaaggaggaggagagagaaaagggcgaagttagcgcgagattaggaaggagaggagggtagagacggagtcggcgagatgttggagaatttaggattgtgggtattttgagcgggagagaaattttaggaagtacgtcggaggcggggtatttgtgggaggaaggtaaattttgtagagcgttaaaggatgtcgggagggataagttagttatggggagattttttagaaattcggagttgaaaatagggtagttaagtaagtaagagttggttagttgaatacgaggtttttagaatgtaaattataaataagaaagaaagaaacgaaagaaaaagaaaagagcgcgcgtagggtttcgggtttaggcgtttagagtagttcgtgcgggggttttttcggtttatagtagtcgtcgtttcgcgtttttgaagtggcgttcgcgtggttattcggggattttttaggtttcgggggtttatttgaaaatttcgagaggttttgtatattttgttaggattggagttgcggggattttttagttttttacggatgtttttttgtacgtgttttttaggaaaatatttaggtttcggaagcgtttttgagagtttagaaatgtcggttgagcgtgaaatttagtttaatttatttatagagtattagatttagaaacgacgtttgaaagagatgtgggttttatgttgatttaaattttgttttatttataataacgtttttgtttttaaagaaaagaaaaattttttagttaaattttttatgttttcggttttttgtttttgtttcgttttttttttcgataaacgcggggagttttggaacgggagggtcggtgatcgcgaatacggtagcgatgtgatttgatgtattgaaattatttatatttttaatgttattttattaaaggaaatttatataaaagcgtttgttttattttaattgttaaaaaagtttgttatattttcgaacggtaattgttttttcgttagatatcgaaagtttataaggaattataatgagaaaggattaggagtcgtttaggttttattgaaatgtttcgatgtcgtttttttttttttttcgaattaagtcgtcgggggaggaggtgggtcgcgtttatcgttgtcgggattcgggtcggtagatacgggttatagcgttttttcgtcgttcgcgcgtacgatttttggtttgcgtcgttttttttcgttttcgcgatacggaggacggcgtcgcgttcggcgagcgtttcggtttttttagtcggtcgcgttttcggggagatttcgagttcgagttttcggggtcggttgtttttcgcgttcggtttcgtaggaaattttcgttcgttgaaatttgcgtgtttacgtagattcgttttaaattttttggttgttgtagggataataaagaaaaatagaaatagtgttaattttttttttattttttagggtatatttaggaaagggggtagggtttattaggaatttgaaattgtttttatcgtttgggttattgtgattaggggtcgcgtttgtaaagtagttattgggttttttttgcgtgtttgtttatttttttttttttgttcggacggtaattgaaaagttttagaagttaagtgtcgggttttttttagcgattttataggtttgagtatttcgtttcgtttttgagtaaaatattttaggttttttttttcgggagtcgcggttttgtagttttcgtggtttcgagacggagtttgggttgagttcgttatttttttaggtagtttcgtcgggatcgtcgcgttaagattttacgttggtagtatgtttttttatgattgattttttttttttttaagaagaagattaagttaattttaatttaagaagaaggaatgtgatttttttttttaatattagagagttttaaagtaaaacgtagtttatatattttaataataatgacgagtgttaagtttttaatgtttttgcgtaggtattttaatttgttatagttattattaataaaaacggtatgtagtaagagtcgattgtttaatagtgtaaggtagacggtttttattagtaataggtagtagcggtatggaatatatagattttagtggaggagtataattgttaaggggaaaatatatataggacgggaagaggttatttttaaatttttaatattgagttaaagagggggaagggtaggcggcgtttttggagatgtattttgggtgaggggatttttttcgttattgtacgtgtttggttatatatttaattgatgttagaatcgattgtatttagagtagatattttagttttaaattgaggatgtttgtataataattggttgtttttttttttgtttttggtagaggttcggcggggggaggggggtgggttaagggagggggagggaggatgagttttaaatgttaatgaaattatagcgggaatcgttttttagaaatggaaatattttaggttagtgttttttggtgataaaaattatattcgattttttttttatttaaattgatttgatcgtaaaggaattttaaaggttgttatttgatttgatagtgtttgtgtttgttatttagcgtgtgggttttttatttatttttttttttggaggaatttttttttaggaagcgtaaaaatgtcgtagattgtcgacggtttgtttaattcggttgttttttttttttttttgttttttagttttatagtaattgattaaaaatatttgttttggattgaattaggatgttttatgtggagtcgtaataaggttgaaatttttcgttgggtcgttgtagggggtttagtttgtgggaacggggtgtttgtgggtggagggagaggtggtcgtgggtgtgtgtgcgtgtgcgtgtgttgagatggtttgaagaggatgtgtgtaggatgggggtgtggtttgtaggaagagtggtgggggagtagtgtgggcgaaggggtgggtgggataattggtagggggcgagtggttcggttcgggagtttttggcgggaggggtaacgtgtttggatcgcgtttatcgggagtttgtcggtttaggaggagttatttttaagtatagtattgtagtttgtaattggtttttttgtatttggggaaagatagtttgatgtcgtgagtgttttttttgcgttttggattagattggtaattcgggtttcgtttttttcgcgtcgttgtagtcgtattatagggaggtcgtaatatgttttgcgttttgagattattaaggttgtttcgtaggttgtagggttagtaggggtgtaggagtcggttgtaggtttgagttgaggttcgttttaggttattgcgtttttttttttttatcgtatttattcgagacggttttcgaggatagaggtatttgttgggtgggtgtttttaataggttagtatagatttgatatttttttatttttttgagcgttttttataggtgatttttcggagtgggtagttagacgtttttttcggttattttcgagtggaaaagggttggagaagcgtgatggggagagggttttaggaagttggggttttaggaattttcgttaatcgtttcgtttttgagtttcgtaaggtaatcgtttttttattttagtcgcgcgttatttgagttatttgtaatgtttattgtatcggcggcgttaatttgagtttttgttcgttttcgacgtgattgggaggttttaggttttgttagaggcggtttgttaggtaataattatttttttagtgttttgataatataaatttgaaagaggagttaatttagaaaaataaaataaaataaaattttttaggggacggcgtttttttagttgaagttttggcgttatttttaatagtggaaagtcgtaacgtttagggtttcgggggttgcgttgcggatttgggggtagaaagtttattttagggtttttttggtaattcgtaattaaggcgtttcggatttaggtttatgttgggcggagtggatcgcgaggggtaggcgattagacgcgaggttacgcggggagtttcgggttaggaggtagagtaggttcgggatcgtggaagtgagagtcgcgcgtattgttcggaggaagattcgagtcgcgggcgttattattttgatttttttatttttttgcgattttcggattggatataggggtcgggttttttcggggtgtatagcggggtaggttgtgagttttttaattggattcggtttggtttgatcgcgggcggtttttgtttagtttgtgagggtggagaagggggtgggggcggggtagtggttggaaggggcgggggtcgggtaggggcgaagacggtggtcggggacggtgggagtcggtcggagtcgggtaggggacgtggtttcgagtggatgggagtgggaggggtgcgcgtcggggtacgtagcgcggtcgggttgggttgtaggttcgcgagtcgcgggttggggtcggagttgttagagaggcggttgcgttataaaagtttgtcggtttttttcgtcgttcgttttcgtcgttttcgttttttttcgtttttttttcgtttttttgttttttttttggtcgcggttcggaggttgtagcgggcggagtaggggaggggcgggttttcgaatatgtagatgagcgcgtgatggatagttgcgcgttttaatgtttttcggaaattcgagcgttttttttttaattttttattttcgattttagatttttttaaatttcgatcgtcggtttggcgcgcggttgcgtttatcggtttcgcgttgttgtcgtcgttatcgttatttcgtcgtcgtttcggttcgcgggtcgtttaggttagtattcgggtcggtttgttttcgtcggtcgttcgggtgttcgtcgtcgcgtcgcgtttcggtcgggcgtggatggagggcgtcgcgcgttttgttcgttgttcggcgtgacgcgggtttcgcgtttcgcgtttattatgttttattcgtagggttatttgtattaggcgttcggttcgttggcgttttattcgtgttcggtttacggcgcgtcggttttggcggtttcgcgtagcgaggagttggcgcgttcggcgtcgggttcggcgtttagtttttattcgggttcggcggtttttacggcgtaggcggttatcggtttcgggagttcgttgtagtattcggtcgacgtcgtcgtcgtcgtcgtcggtttttcgttttatatggtaatcgggcgcgggcgggacgcgggatttttgggcgtcgggatttagacggggtttaggcggagcggggttcgggttcggcgggcgggggtcgtcgggaatgtggcgcggttggcgatttaggagtcgtcggttcggttggtcgtttcgtaggttgagtcgggtttcgggtggggagggtagcgcggtaggcggggacgtttttgagttcggtcgggattcgcgcgtttttcgcgcgttttttcggttcgtcggttgattttttttgagagtttgggaagtgcgttttcgtcggggtcggggtttggcgtcgtttgtttttggttttcgtatcgtagtttggggaggcgttcggagcgggttgtgtgttcgtttgtattggcgtggggcgcgagggttcgcgttattgcggtttttgagtcgacggtcgggcggttcgtatttattcgcggggtttagggcggtgggggttatcgagttaggtttaggagtcgagtatttagttgcggtttcggagttcggttcgaggcgtttaggtttcggttttattttgtttagcggattatgtttttaaatatcgtgtttgcgggcgcgtgattcgttaagggtcgtttgagtttttcgtggttcgagcgtagtttttgtttcggcgatttgggggcggttcgcgagtttcgaggttattgagttgggttaggttcgggtcgcggcgaagtacgttacgggcgattgaggttattacggggttgtcgcgattgtcggttttcggcggaatttttgggtagcgatcgagtcgttggggttttggcgaaggttgtaaatgtttcgaatttaaacgttaaaggatgaattaaaatgttaattacggcgtatttgaagaattcgaaacggtgattggtttttgagttgtaaattggatttgtttagttttagagtagtgaatagtgaattgggggttttggggtgtttttttaattatataagggaggggaagagggagtagggggaggtagtcgtattttaagtatttgtagaaatttagatattaaagagttatttgtgggtttgtgtgcgcgtacgtgtaagggtttgtgtatattgttacgagcggtttcggaatatttaggggaagatgggttattttaggaaagtgaaatagtttagaaattcgagaataaaatttcggtattttttgtgattaatagttggtttcgaattatattgcgttttttttgtttttttgcggcgggaagcgtagttttagagttagatttacggggggaacggtggtcgtgggcgggcggaggggtggtattttttggttggttgttcgcggggttttcgtatattttatttataggtttttgttggttttagggcgtattttacgacgcgtatattatcggtatgatcggcgttattagttattattcgtacggtagcgcggtttattcgtattagtttaacgatttcgcgtatcgtaagaacgttacgcgggacgttacggttatttttaaggtttggtttaacgagtatcgtaagaatttttattttattaagggcgagaagattatgttagttattattattaagatgatttttatttaggtttttatttggttcgttaacgcgcgtcggcgttttaagaaggagaataagatgatttgggtttcgagaaataaaagcgaagatgaggacgaggacgagggcgacgttattagaagtaaggacgagagtttcgataaggcgtaggagggtacggagatttcggtagaggacgaaggtgagcgggtagcggtcggcgtaaggtttcggggcgttttttttttaggcggggcgtagagttaaggcggggaggacgttgttcgtcggatattttaggttcgggtcggagttttagtcgtattatattgttttggggtcgtcgggatttgagcgagcgatttttcgggtttttttcggggaggttaggtttcgtttgttacgtggtcgggtgggggcgaggtgaggggtttcgtggggagggtttagtgtcgtaggatagggggcggagggggttttaggtgtttgcgttgttttttcgtgttatttatcgtgttcgcgtttttatagggattagtttgtacgtggattcgtttacggattattcgtgttcggtcgagtcggacggggagaagttttcgtgtcgcgtcggggattttttgtgcgaatcgggttcggagtgtaaggataagtatgacgatttggaggacgacgaggacgacgacgaggagggcgagcggggtttggcgtcgtttaagttcgtgatttcgtcgtcgtttatcggtttggaggcgtcgttgttgagtttttcgttcgaggtcgcgtttcgcggtggtcgtaagacgttttagggtagtcggacgttttcgggcgcgtcgtttttcgttagtaagtttaagttgtggtcgttggtcgagatcgttacgtcggattttaagtagtcgagtttgggttcgggttgcgggttatcggggttgttcgcggtcgtcgcgtcggttttaatcggggtatcgttaggaggttcgttttattttgtttcgtcgttgttgggtcgttttttttattatacgtcgtttttttacggtaattatataaattacgggaatttgaacgcggcgttgtagggttagggttttttgcggtataattttgcggtcgcggttttcggcgaggttttgtatatcgcgttaaaggcggttagcgacgcgggtaaggcgggcgcgtattcgttcgagttttattatcggttttcgggcggcggttacgagtttaagaaaggtaggcggttcgcggtcggcggcgttcgggaggggagggagagttagtttcggggaggcggagcgttcgggagattcgagggagggttcgg

SEQ ID NO: 11452 - DNA, 1059 bp, synthetic construct
  misc_feature 1..1059: note = Description of Artificial Sequence: Synthetic polynucleotide
  source 1..1059: mol_type = other DNA
cggatcgtttttttttattttatttttcgggtttttattgtcgcggttttgttttattatttttagttgaggggtagttcggagttttatggttttttttttagagcggtcgttttttcgggtttttttagagttttcgaagagtcgcgtgaggaaacggggatttgttcggggtagtagatttttagcggtgaagacgtagagtatcgggttgacgttagaattgaagaaggttaaggtcgtagttttcgttcgcgtcgtttggtcggtttcgtttagtttcgttaaggtttttttcggtggagttagcgttgcgatcgtttgtagaaggttgattgcgtggtagggggtttagagtaagtcgaaggtaagtacgatggcgtttattagtcggtttattcgcgtttcgtgtcgttcggagttttagcgggcgtttcgtagtcgtgttagcgttacgttgtagtagtcgagtattagttcgaaaggaagtacgaaagcggttagagtttttaggtttaggtgggcggcggcgtggatcggcgacgggtggtatagttggtatacgcggtttttttataggtggcggtagacggcggtcgggacggcgagtaatagggcggttagttagatcgttagtagtaggcggcgggttagggtcgggttgcgtagtcgaggcgttaggaaggggcgggtgattgcgaggtagcgttgtaggttgagtaggtcggtgagtagtacgttggcgtatatgttgagcgcgtatacgtagtatatcgttttgtagttcgtttggtttagcggttaggtttgtcgggttaggaaggttataaagagcggcgtgagtagtagtatcgcgtcgtcggttagcgttaggtgtagtataagcgtggtcgttagcggtcgttttcgtgtaggtcgttagttcgttaagttttatattacgaagtcgttgttaggtagttttagtagcgtcgttagtagtaggaaggttgtgtttgtggttcgcgaagttttttagtttagtagtgtttcgttttttgggggacggtagtagatcga

SEQ ID NO: 11453 - DNA, 1663 bp, synthetic construct
  misc_feature 1..1663: note = Description of Artificial Sequence: Synthetic polynucleotide
  source 1..1663: mol_type = other DNA
cgtaacggggcgggggtagacgtttttagttttagaatttcgtcgggtttatcgtttagtgtggacgatcggcgtttttacgagatttatcgagggtatatagtttttattttagttcgttttattcgatttagacgatcgttagcgcggttagcggttagcgtatagcgagttgtttgggtaattgtggtcggattttagggagtaagttggtttcgggttttatttagttttattcggtttttatcggtttttttatttaggagttggaggatggtttcggggcgttttagggggattgttggttttcggagtttttagttagacgcgttttgttgtgtgagtcgcgtgcgcgtttaatttggaggtagtcgttttcgtcgttgataggtgttgtttagagggcgtcgggtgcggtttttggcgtagttggacgcgtacgtttcggtgcgtgtagtttttcgagttcggttagagagaagagggagttagggcgcggtttgggggacgttagtggattggagtcgcggagtttcgagggaaaaattttgtaggcgtcgcggtcgggattcggttacggttttagtttattttagtaggtgcgggaggaagaggtagcgtcggagtttcgaggttagagagtttcggcggcggcggtcgtttttttttttcgagttggtttgaagtcgttgggtattttcggtttttgttgttgcgttcgtcgtcgtcgtcgtcgttatcgttagcgtcgtggggattcgggaggaggtgtagtcgaagagggaggagaagtaggaggaggaggaggaggaggaggggagaggaggagtagggggtggaggatggagtttcgggttgtcgcggcgggcgagttagagtcgtcggcggcgtttttttttttttaggttcggttttggaagaatttgtagttgggggtgggtaggagtaagggcggcgggggcgggcgcgttgggggtttagagcgtcgtattgcggatatttcgtcgtttttttcgttattttcggtgggtatagggaatgtatcggttagggggagtggtgtaggtagtaggtggagcggttttaagaagcggaagtaagtgttggatcgagttttttttttttcgtagtttaatttgtgttgttcgtcgtcggagtttttggagttcggcggcgtcggtagagtcgagtaggggtttacgttacgtcgtcggattcgcgagtatttgtttttcgtcgtaaaggggttcgcggcggtttcgggagtagcgggagggacgttttttggcggacgttttttcgatttagttttttttttttttttcgttttattttttttgttttttttgttttagtttttttcgaggggggatcgcgttcgagatgagggtgtacggcgttagggtttcggggcgtatttgtgttattagaagagtttttttttgtcgggtatcgtttgtttggagtagttgttggagtcgtcgttttttttcgtagagtcggcgcggagtttcgcggagtttcgggtttcggagacgggcgaggagtacggtagtagttaggtgagtgtcggtggcgcggtcggagataaggtgcgcgggattacgtttttttttttaggcgtttattattcggggagcggggggcgggggtcgggaggcgg

SEQ ID NO: 11454 - DNA, 2065 bp, synthetic construct
  misc_feature 1..2065: note = Description of Artificial Sequence: Synthetic polynucleotide
  source 1..2065: mol_type = other DNA
cggagtaggtcgacgagagatttttgagaaggttggtagattatcgcggatttttgtttttttacgtggagttatgggcgaggcgtttaagaatttgttgaaggagttcgatttttttaagtttcgggttaggttttggagtatgaggtcgttagttaggacgtttagaaatgtattggtggtggaattgaggatggtggcggttatttgtacggggcgtttggtagtaagattgttatttttattatcggtcgtatttggtttcgtggtgtttcgtaggtttggatcgttaagaaggcggcgtagcgcgtacgaggagtcgggtcgtaggtattggtaggcgcgacgttcgttgtgattacgtacgtgtatttgggtatttagacgtattattagtagtacggtagcgttttcgtggtcgtgtagtgtagttaggtgtagcggcgtgtagtcgtcgtgggagcgtgcgtttacgtcgattggtgcgttattgcgtcgcgcgatttttattagttgtagcgttatttcgtcgtcgtcgtttttggcggtttaatgtagggtcgtgaagttagatatgaagtcgcgtttggtcgttaagtcgcggtcgcgtagtagtagttcgtgtagttggtgggtttagcggttttcggtagttcgtacgagttattcgtgttcggacggttttaggggtatcgcggacggcggcggcgcggcgggtaatttttcggcgttagggtttagtagacgcgggtcggcgcgcgataggcgttttaggtgcggggagcggttcgggtttaggtcgaggtttagatcggatttttttatcgagagtcgttttagtagtagaggggagtttcgcgggttcggttttttcgatagttgtcggcgtaggtcgggttttttcgttcggaggcggagcgtggcgggggtcgggacgtagcgtatcggtagtatatagggtttttgttgcggcggttttttcgttgtttcgggttcgggtttcgcgtttggcggattagagtagggcgatgtcgttttagaaggggttttaggcggtggggtcgcgtttgcggagggtttttcggtggtttgggttagtttaagggttggaagcggtgggtcggcggatcgtttttcgggcggttgagcgggttcggaggtcggttttttcggggtgttttgtggttttgttggtagatttaggttttttggcggttttattggtcgcggtattcggattaagggcggagttttcggggtagaggcgtttcgcggtaagatcgtcgaagtgggtttcgacggttgggtcgttgttttcggggggtcgaagggtgcgggttcgggtttcgggggtcggggttttttttttagtattacgaatttgacgtcgtcgagtttttttattatcgttacgttgttgacgaattgtttgaagcggtttttgcgggcggcgcggtttcgcgggtcgtcggtatcgagtagcggtttgaagcggtttagtagttcggagttgcgtattttttcgtcgtgtttttgtaggaagtttagtatcgtcgtttggtttatttcggtagtcgtagcggcggcggcggcggttagcgttatggtggggttttgggtttttggttttcggggcgggtgggcgtcgcgtcgtcgcgggacgcgcgggagcggggtttcgggaggcgcggtcgcgtttatttggtgtttttttcgcggttagtcgggcgtgttttcgaagttggatttcggtcgcgttagtgtcgttgggtcggggcgtttcggggcgaagggcgtcgggggtcgcggggagcgtttatttttagcgtttcgtcgggtttcggttttcggggtaggtttttgtttttgtattttgtttaatgggcgtttgtttttatttttcgcgtcgcgttcgttttataggtgatagttgttttcgcgatgtagagggaatcggagtagaaattttcgtcgtttttcgttcgttttagaattaaaggcgtagcgttttagttttggtttcggttgttaggtgggtgtgttttttagggacgtcgcggttcgt

SEQ ID NO: 11455 - DNA, 3487 bp, synthetic construct
  misc_feature 1..3487: note = Description of Artificial Sequence: Synthetic polynucleotide
  source 1..3487: mol_type = other DNA
cgcgcgtttttagttcgtttttggaggtagttcgcgggatcgtaggttggaggcgcgtcggcgtgatttcgatcgtcggagtcgggaggaggagtcggaggaggttgcggggggtttcggtttaggcgaaggaagggtaagaggttgttcgatcgggggcggcgtcgggaggtgggtgggtttaatatttaggtcgggggaggggtttaagagatatcgggaagggtagtcgagttttaggggcgggtggggtggtagttgtgtgtagtaggggatagggttgggtttttggaagttagagtgaagtttttttggttgtttcgtaggtaattttattttttggtagaatagttgcgaatcgttaagttgatttttttcgttttttggtcgagaggagaggatgttttaggatttagggatgggcgggaagaaattatggggagttataagtttgtatttaggcggggaggaggcgggcgggcgtcgtttcgtaggcgtaggcgagtgggtgggaagaagggagggagagggaggaaggaggtgaggtcgggaagatgttattgtcgggggcggggcggggtcggggattcggtaaagggattgtagtagcgttaggtgggggcgggggttgtaatgttatttatttgagagttaggtgtgtgcgttttaaacggggttcgttataagtcggtatttttttggtattatttatggtgtagggttttaggtagagggttggggattgcggattcgtttttgaagcgggacgcgaatcggtagagttgggagaaggtaaataagggttacgttttttgtcgtcgtttcgcgggcgcgtattcgtcgtttcggtcgtcgtcggtatatttttatttttttagcgtttttttttagttggattatcgcgcggtttcggaggtggaggttgttttcgattttagtttttatttttggcgtcgaggtttcgtattttttatatttatttggaaagggtgtttttcgtttttttaaaaaaattgtttaatttgtgtagagtttttaattttaggagtcgagtatgttgttttcgcgtgtagcgttcgcgtgtatcgggtcgggagagggggcgatagggcggaggcggtggttttcggaaggtgtttgggatcggatcggttgtacgtgagtttagcgcgaggttatgtgtatcggtttagttcggttcggcgttcggacgtgttgcgtattaataaaatgaaattcggggagataggagggtagatagttttaggttttcggagttttcgttcgggtcgttcgatttttttatcgtatttatttttcgtcgtagtttttacgttcggtcggagttcgcggggaagttgtagttttggcgcgttttcgttcgttcgcgttttttcgtcggttcgggggcgttttgtcgtagttattaataaagaaggtcgttaagtttatttttttaaaagttgttgttgtatgcgttttttttagttttttcgtattgtattttttaaaatacgattgattaatatgcgtaattttttttttttgtgttgtgtatttttttttttttcgcgttggttttttagaataggtagttagtaggagagagagggagcgagcgagtaagagagagcgagggagcgaagagcgttggtagatttgttgtaaaaacgttaaataacgtcgtggagatgcgtagggtttattcgtcgggggttggattttattttgtttcgcggtgtttttttgacgggcgttgttttcggttacgcgtcgttgtagggatcggcgcgggaaggatgttttcgaagtcgggagtttttggggtcggcgcgggagggcggggggcgcgtatttattcggggtcgcggcgagggaggcggtcgggttcgcggcgttttaggttttacgtttttcgtcggggacggtcggttcgtaggatttaagtcggtgtcgttaggagtgggcgtaaagtaattttatggacgttatttattttttttaaaaaatagtttttaattgcgatggtcgcggtcggtattatttattaattttttgtgtatgtttttgtttttttttaaattaagatttttttgtgatttttttagaaaaaaaaaatgtgttggggtgggggtggggtgggggcgggtaggaggagcgagggagggggagtagttattttttttttatttattcggattttcgttttcgatattttcgtcgtcgtttttttaatttttcgtttagttgtttggtttcggcggggagtttaggtagcgttgcgggtttcgtgggggaagggtgttttttttcgtagttttattattacgtttgttggtattttgggttcggattttttatggattttggggcgtttttagttcgttttgtttttagggtcgggttcgagcggcggttgcgttcgtgtaagttttattaggtttgtttatattttatatatttatatatatatttcgtttttttatttttttatttatattttttgtttatatttcgttttttacgcgttttagattcgggcggcgtttttcgtaattttaaaaaaaaaaaaaagcgagtttatatttaaaaaaattttttggcgttatattaatgacgtatttaaaatttgttatttttttttgcgttaaaaagacgtttttttgtaaataatagtttggaggcgatattcgcggagggaacgaggtttgtattgagtatttcgtttttcggggttttagcgttggaagattttcgttttaggttttgtttttgaatcgttggttttaaaatgcgaatcgaataaattgcgtggcgttttgtagtattagaagtgagtagaaagtgttggtaggaggggagtggaggggcgaacgcgagttttggggagggggcgcggttttttttttcgtatttattttaaatggaaaattaatatttcgggcgggggaatttgaaattgtaggcgattttaagaaaagaggggcggttcgtagagagggtttttattgggttcgtcgtttttttttttttttcgggtgttttttggcgtttagcgttgtttcgtattttcggggggtggagaaggtagtgatgagcgggtgggtgggtggttgtatattttggttttagtaggattttgtttcggggcgatttttttttttttgttttttttttttattatttcgaaaggttaaaaatcgaggggtaatttttaaaggttggtatatggcgaggaagcggggcgtttttttttttatttttcgttttttcgttttttttttttcggttttatttttcgatttgattttgtggtgtataaatagtacgttcggattttcgtagtttttggaagaagagtttgcgttcgttaggcgggcgggttgtcgggttgttagtcggcggtggcggggttttgggtttgttttcggagtcgcgggttatatttatttaattcgttgcgttcgtcgagtttattttttttcga

SEQ ID NO: 11456 - DNA, 847 bp, synthetic construct
  misc_feature 1..847: note = Description of Artificial Sequence: Synthetic polynucleotide
  source 1..847: mol_type = other DNA
cggtcgttttagtaaagtttttaatttagtcgatatgacgcgcggcgtagttaatgggaggcggagttggcgttttttggtcgggggggggtcggaggggtgggtttcgcgttttcggtgtttgtcgtgtttattgaatggagagagcgagcgtcggttagtttattcggtcgtttcgtgttttagtcgtagtcgtcgcgttttttagtttagttttaagtcggattttttcgggcgttacgttttattgcgttcgttttaggtttttaattcggttcgcgggttagcggggttagggggcgtttcgtatttgggtatttttagcgatgcgtagcggggtagcgtcggtttcgtcgatggagttgttgttgttgtcgtcgtcgtcgttcggagcgtttcgtttcgttcgcgtttcgtgcgtttgagtatcgagttcgtttttttttcgcgttaatttcgtcgttcgttttttaggtcgttcgcgtttttcgcgcgttttttcgggttttacgcgttttgtttcgtagaggtagttttttttaggagcggggttttgtatattatggttttcgggtgggtaggggtcggcgtcgtcgtgcgcgttcgtttggcgttggttttggcgttggcgagcgttttgagtgggtttttagtcgtcgtttgttttattaagtgtatttgtttcgttgttagcgtggattgttacgggttgggttttcgcgcggtttttcggggtatttttcgtaacgttgagcgtttgtgagtatttttgttttattttacgcgggttatttatttgggttttatcgagggggttttaggcgttagattcgtttttttttttcgg

SEQ ID NO: 11457 - DNA, 909 bp, synthetic construct
  misc_feature 1..909: note = Description of Artificial Sequence: Synthetic polynucleotide
  source 1..909: mol_type = other DNA
cgggacgggggcgagattttgggtttttaggggtattgaggggtcgtttatgtcgggggatatggttatttgggggcggttttcgttaatcgcggagtggggaaaaggggggagggatggaggacgaacgttcggcggtgtttaaaggtacgacgcggagtaggaattatagttttggtttttagaaagcgcgcgcggttcggggtagaatttgtcgaagttttagttcggggcgtaagggatgtgggggttattggaagacggggcgcgggtcgttcgtggggaggagattggattcgaattcggtttattttattcgagcggcgacgttagcgttgattttaggcgtgtttcggttttcggcgcggtttcggtttaatcgtgtacgttcgcggaaggtttcgtattcgcgttagaagtggtttgttcggggttatcggttcgtaagttttcggtgttttcgaggtttttgtttcgtttcgcgcggttgtagtcggcgggaggggttgagaggcgggtcgcgttgggatttaaggcgtcgttttttcgttagttttttttttttttcgttatcgggtggtcggagattcgggggtattgttggggtattttaaagtatagggttagtttgagtgcgtaaggttttgaaaagacgggggggcggcgataaggagtagggaggggggttggaggaagacggtaaagtgatttcggaagggtttaggcgttttaagtttatcgaagacgggaggtttttagtggcgtttggggggattgtgggaaaagtagtttaagaaggggaatttggagcgaggtgggggagaggtcggtatggttttttttaggagcgttagcgttagatagagcggtgataggtcgtatcgggagtatttcgtttatattgaacgg

SEQ ID NO: 11458 - DNA, 2150 bp, synthetic construct
  misc_feature 1..2150: note = Description of Artificial Sequence: Synthetic polynucleotide
  source 1..2150: mol_type = other DNA
cgtttttcgtggtcgggaaggttaggtcgagcggggcggttagtcgggtcgggaggagggggtttttcgggtcgcgcggtcgtataaagcggggagatttgttgttgcggcggtatgaggcgcgttttttttcgcgagttagcggagcgcgcgcgttcgttttcgtttttcgtttttcgttttagttttcggagcgttattcgcggagcggtttacgttagtcgtcgggcgtatcgcgttttagcggtcggggaggtgcgttgttcggttttcgtaaagttattgtgaatggggagcgggtgacgttagcgtcgaatgttaataatgtagcgattgagagtgtgggcgtttcggggagagcgtaagtcgcgcggcgcggagtaaatagcgtcgagtcgtcgtcgttttagtagtagtagtagtagtagtagcggtagtagcggtcgtgtacgttcgggttgcggtcgtatagcgttaacgtgagcggtcgtcgttttcgttatttcgtttgtttattttcgtcgtcgtttcgttttcgtttttttttcggttttttttcgtttttttttttttttttttttggcgtattcggggggttgggaacgagttgttatgtgatgcgcgtttttttcgcgagttttcggtgatttacgaattgtttatttcgtcggttgtcgggagggggttgcgagtcgggaagacgcggggaagaggaggcggaaaaggacgtaaagtttttcggcgaggtgagtttcgggtttcgggtttcgggtttcgtcgttgggcggggtggcggggtaagtttgcggggggagcgggcgcgcggggcgggcggggaggcgtggggaaacggcgcgggaagggagtttcggtcgtcgggcgcgtagtcgtttttttcgcgttttgttcgtttttatggtattttttaggaacgggaagggggtgggagtcgagtcggcggtcgcgtcgcgtcgaatgtgtgttttttttttcggttgtttacggcggtcgaggcgtattgtattttgttggcgtcgaagggtgttttggaatagtagagggaggaggagtagagagtaataagttaggtatggggagggcgggttgtaggaggcgcgcgttcgcgcgagtcgtagtagttgttagattcgcggttttgttttcggttcggcgaggttcgggtgtttcggtttttagtttgcgattttagttttaggtcgggcggttttttttttaattttcggcgtgcgtatttcgggttgtttcgcgaggattttggtcgcggcgtttttgcgtttagttgttagtcgtcgtcgggtggttcggattatcgcgatcggcggggaattaaagtttaagtttagggtcgtaggaagaggcgagttgggggtttcgcggcgtagatttggatcgaattttttttagcgaaagatcgggttgtcggaaagcgtttcgcgtagttaagatttaagggcgttaggtttttgagagggaaattttgtatttttttttttatagattttttatgaagttaaggtgtaatatatatatatatatatatatatatatattttatattttagtttttaagttttagaagttttatttaggagattggtttatgaaggggatattgtttttttcgttttcgcgtcgaggcgtttcgtggtttcgttgtgtttcgtttattcggcgggtgttcgggagttcggcgtcgttggagacggcggcgggcggcgtttacgggttattttaggtgtttacgaggggagagattggagcgagtatttcggcgatttcggtttggttaagtatttgtaggaattcggatcgtgaggggaagcgtgtagggtcgggagtgagtgtgtgaaggggtggtatatttttggtttttggggtcgcgggcgtatggggtatttttagtattttttcgcgcgtaggcgagtttggtaatttgagggaagtttcggcgcggtcgttgtcggggtggtttgtttgtggttcgatgaggcgcgtttcgtagtttgttttttcggttatcgtcgtcgtcgtgatttgtggtttttaggaaacgagagggatcggggcgttttattcgcgagacggattcgtagtttttcggcgggttcgcgggcggcgagacgcggcgt

SEQ ID NO: 11459 - DNA, 506 bp, synthetic construct
  misc_feature 1..506: note = Description of Artificial Sequence: Synthetic polynucleotide
  source 1..506: mol_type = other DNA
cgttttacgacgtttatgttagggttttttagattagcggagaaattagtagttttggatcgtaagcggcggggttagggaggcgataacgggaagtttttgtcggattttggatatttaggatttagtgttgttcgggcgttttttcgtagtagttttagggcgaggaggatggggggggttttcgtaggggttatattgtcggagttttacggattcgggcgggacggtgaggtttttatattgagtcggtggtaaagttttcgcgaggatgaaggaggaatttcgtgttttttattttattaggtttcgtattttttggttttttttgttttaggaatcgtttgttttttgtcgcgatcggcgagttttttcgggtttttttgaaatagtttcgtttcgaggttttggatttggaagtttaggggtatcgttcgggagcggggtatttattgtgggttttcgttagttagtatttaggttcggagttcggggatagcgggcgt

SEQ ID NO: 11460 - DNA, 1503 bp, synthetic construct
  misc_feature 1..1503: note = Description of Artificial Sequence: Synthetic polynucleotide
  source 1..1503: mol_type = other DNA
cgcgtttttgggtatttagaaataggtttttttcgggaattcgttttcgatcgggcgtttttataatatttgaagttttttaggacgttttttgagttgggtaaggcgagaggatttttttttagagtttagtttcgagtaatgttcgagttcgcgaggtggggttgggggcgataaggaggcggagcggggatttagttatcggggatttttttttaagttagtttttaaattattcggcgttatgtatttatagttcgcgcgtagttcgtgcgttttggattttatttaagtattaggttcgattagggtcggttcgaaggttatcgtttacggttagggtagaggggcggcgggaaaagggtttagtggattttcggtttaggagggtcggttagttgttgggtcgcgggtatttaaagttgcgggggttcgggttttcgattttacgtttagcggggttttagtattcgagggcgcgcgttgcgattcgtagagtagcgggtgtagtaggttggcggggttgggatcgcgagttttgtttgtaaagtttaggcggggtagacgttagggagggggtcgcgtttacgcgggtagtttcggcgttgataggtagcgacgtattttttcgtaattcgtttattagtagtttaaagtgtgtattgggtttttagtgaaatgtttggttttgaaagtttagttaatatcgggtttagcggagttattagggtcgttttttgtttcgtagaattaggttttggtttcggttacggtgggggtttcgtattagttcgataatttcgaggttacgcgttcgaaggattttttgggataagaagtggagtggggcggttaggacgcgggtcgtggggatcgcgagggaggagggggcggtcgttcggatttatttcgtggggttttcgcgcgcgggcgtttcggcgtgtcggattatgtcgtcggtagtttcgggacggggaacggaggcgtttaggcgtcgggtcgcgcggaacgcggagtttcgggcgttcgtatgtttttggttttggttttttggaagggttaggtcgtcgttgtcgtcgcgttttggggttttcgtttttttttattttttgtatcggagcgagcggggtttttaggaagaggttggttttggtggttaagggtttttttgttaaaagttattcggtagcggttcgcggttcggagttttttggggtatacggaggttcgggcggtcgcgttttcggggtcgggtttcggggcggggggtgttggggttaaggcgtcgtacgggcgtttaatttcggggtgtcgtttttataggttgtggttggggttggggcgcgggaggttcgcggggtttcggagagggaaatttagagaaaagttttttatttggtttggggtcgtaggggaaggaagacgtttttcgtttgtgtcggcgtcgatcgcgggtcggtaggtggggaggtttagagttggcggggagttcgttttattcgg

SEQ ID NO: 11461 - DNA, 907 bp, synthetic construct
  misc_feature 1..907: note = Description of Artificial Sequence: Synthetic polynucleotide
  source 1..907: mol_type = other DNA
cggtttacgtgttttttattttggttcgtagaggtttgagtgttgtttcgggtagtttcgggtagggttgggtagggtttagcggattttacgggtcgttttttttcgtttttttttagttatttgtttgtcgttttttttcgtttttttttttttgaggtgttgtttcggttttcggggcgggggtagtcgcgggtagtttagttcgtagcgtttttagaggtgttcgagttttttgaacgtttcgtaggaaagtagttgtgttgcgtggagtttttttttcgtttcggttttttcgttcgtgtttttgtttttttcgttttgcggcgggaggtggcggtgtgggttttcggggaggcgcggcgggttggggaggtggggaagggtgtgcgcgtgttgggggtgggggggaaagatttgtcgtttttttttttcgtttttttagtttttggttgttatgtagtttttatggtagcggtatttttagatttaatttttattttcgtttagagttaattaaggtaaaatagtgaggggaggagggaagagcgtggttagggaagggaggggggagaggtaggaaatttaattcgaagttgtaagtgtagcgtttattttgttaaagtcgtagtatagatttcgaagtcgtagcgtcgttttttttttttttcgttttagttcgagcgggaagcggtagtagttttttagagttttggtttggtagggaggggacggcgttcgagtagttatattgtagtttttcgggtttttttttcggtcggcgtaggtttcgcgtttacgattttttttgggagtcggatttgttttttttatcgtcgttattcgtcggtttttgcgttttttggttttcgatatttcgtttggtcgtttttttgtgtcggttcga

SEQ ID NO: 11462 - DNA, 1925 bp, synthetic construct
  misc_feature 1..1925: note = Description of Artificial Sequence: Synthetic polynucleotide
  source 1..1925: mol_type = other DNA
cgggtttttcgtcgttttggggttgagtttggtgtcgttgtttatattgaataggacgttttttttcgtgagcggcggaatcgttattcggtaaagcgggtgttcgaatagtttggttaggagggaggcgttttcgtcggggtcggggggcgattcggatcgacgcgggtcggggtttcgtagtagcggtcggtgcgcggggtcgtggggttttagggcgtcgggatttcgttttcgtaaggcgcgttcggtcggttcggtcgcgggcggtagtttttttagcgagtgggacgagaggttggaggaggggtcggagttgaagttttgtaggatgcggagcgtgtgtttgttgggttagttcgcgtcgtcggcggcggaggaggcggtcgggggtttttcggggcggtttcgaatttgggtttagtcgggcgcggttatttcggcggcgggttgcgcgtacgaatagtcgggttttttcgagggtcgcgcgtcgcgtcgttttagtttgggtagtaggtttagggcgatgtgtagcgcgtaggttattaggaatattattaggatgagtacgcggaatcggcgtattagtattatttttatggtcgcgcgggtcggttcgggtttggagcgcgttttgttcgcgcgtttttttagttgtagttgggtacgagcgcggcgtcgtttcgcgggttaaggtttatcggtgtcgggcggttattagtttcggggttgttttcgggttcgggtcgcgtgtagggcgttcgtcgtcggagcgttgggttttcgcgttatttcgggttcgttttcgttcggttttttcggagcggtcgcgtttttagtcggggagtttaggggttttggttcgcggagtcgggcgcgcggggggcggttggggtcgtagtagggggaggttcggcgttcgtagtcgtcggcgcggggtttatcgggcgtgtgggtttatttcggtcggggcgcgacgggtttgggcggtggcggcggtcgtaggcgtttcgatttttagcgcgtttttttttaggcgtcgggcgggcgggcggggaaggggcggttttttcgggtcgggttttgtttttacgtcgcgttcgggagatcggggttggggggaaggggggggcgaagggcggaaggggtgggcgcggggagcggtcggcggggtttcgggtaggtgtagcggtcgtttcgagcgtagttttcgtttggtcgagtttttcggcgtttcgcgtttcgggcgggtagatatcgagcgtcgcggagtcgtttttcgcgttagcgtttatagattggcggagtcgtcgttttacgagttacggttgggttcgggtcggttgcgttttcgtttttttttttttttttttcggtcgcgtttcgcgacgtttttgagtttcgggttcgttaaggagagggttttttttgttcgcggtttgtagagggaagcggcggagatcgggagggcgcgttcggttttggttaggttagtagttgcggtcgagtggggggtttcggtttggtcgttttttgggattttttttcgttcggggtcgtcgtcgttagttgtagtttttcggtttttttttagaggagcgcggggtcggggtttaggttaagttttttttcggagtcgcggggcgtttgcgtcgtcggatgagtttttcgtcgggcggcgatttcgtgttttacgttcgtttcggtaaggaggaggcggaggcggtttcgcgagagaggtttaaggagcgattgggtttggatttaggggacgttagggtagcggagttttcggtatcggtttcgttttttttttttcgtttattcgcgggacgcgttcgttttaattttttaggcgtcgggttcgttgggggcgttgagaggggttggtgtgtcgggggcgtttttttgtttggggtcgacgg

SEQ ID NO: 11463 - DNA, 1287 bp, synthetic construct
  misc_feature 1..1287: note = Description of Artificial Sequence: Synthetic polynucleotide
  source 1..1287: mol_type = other DNA
cgcgtggttcgggaggttttcggaggagggaagggtttattttagcgaggggtataggcggagaaggtgcggggcgaggcggtcgcgggtttttggtatttttttttttacgtttaggttaagttggcggtgttgttggtgacgttggtggtggtcgcggttttttatttgcggatggagtagaagttgcggcggggcgtggtttcgcgttagtttcgtatttcgcggttttagtataaggtgcgcggtgacggttatttggaggaggataattcggacgagagcgacgcggagggcgagtatggggacggcgcggaggaggaggcgtcgttttcggggtttaggtttggtttcgagttcgttggattcggtcgtcggttttgttcgtacgaataggcgtaggggggcgacgggtcggaggagtagtgaggggtcgtttggttttcggatttagtttcgtttttcgtcggttttagtttattacgttttaggtcggggggatttttttcgagtttcgcgttgttttcgaaggtttttgtttttttttttttacgttggggacgttttttttagagttcgggttattttcgggttttcgtagttttttttaaggcggagtggagttttgggaatttttcggttaagtataggggttcgaaaatatagttgatatttcgcgggtttttagtacgcgttttagcgtcggagtagggttagggtttttttgcgattcggtttcgttttagatttttttagttttcggtcgcggattcgggtcgcgtgtgagcgttttttgtattttttatttttagggttcgtcgagagttacgattttttatagaaaatgagcgataaagagattttgtattgttttgattggagagttttaggtcgcgggggacggagcgtttttgggatgtacgttcggttggttcggtttttgggcgcggtggtgagaggttttgatttagggggatcgcggggtgtggggagtgcggagttttattgggggcggggcgaggtgttcgtaggtttcgtttattagtttttttttttttttgaggtttcgtttttttatgtttgtttgtttttgttagttttagttaggagaagggagcgggggagcggttggtagagatagaggagggtgtgacggcgttgttggttttttatgggtttagagggcgagatagatttcgaaggtatattttttaggggtttgtgtaggtattttcggttttttagcgattattttcgcgtcggatagggtttattttcgagttacgg

SEQ ID NO: 11464 - DNA, 2906 bp, synthetic construct; identical to SEQ ID NO: 7254
  misc_feature 1..2906: note = Description of Artificial Sequence: Synthetic polynucleotide
  source 1..2906: mol_type = other DNA

SEQ ID NO: 11465 - DNA, 2146 bp, synthetic construct
  misc_feature 1..2146: note = Description of Artificial Sequence: Synthetic polynucleotide
  source 1..2146: mol_type = other DNA
cgaaagcggttttgagagcgttttcggggttttttcgaagtgtttaaattattagcgtggttagcggtttcgattttttattacgttttttttcgcgggtttaaagggatttgggtttcgtaaatttttgtcgagggagacgttcgtcgatttcgtcggtttacggggcgttttgtttttttcggggcggttttttaggtaggttgagagcgaacgggatgagtatatttcggacgtttaagggggcgtttagcgtttcgaagtcgtcgttttggtttgcgtcgtcgtcggtttcgttttttcgggtaggttggaagcgttaggtgttcgcgcggtttacgtagtagatggcgtcgtttagggcggcgtagcggaagggttgtaggttcgtggggtcgtcggggaggcgtaggggcgcgacgtacgggttttattgtttggttaggtagtggtatcgggatacgttgatttcgttcggtttcgtcgtttgcgtttcgtcgcggttgtcgtttagatcgaagcggtagatgaagtcgtcgagagttattatgtcggtcgagcgttcgcggttgttgttgtacgggtatttttgttattcgtcgcgtcgcgggttatatttgagtaggcgatagaagagggagttttcggatacgtagatttcgtcgtggtaggtggtggttttatgcgttacggcgaaggcgtttcggggtagcggcgttacgggggtttagcggtcggcgcgcgggtcgtagcgttttacgttgagtaggtattcgtcgtttacggcgtagaggtgatcgtttagggttagtagtcgtagttgcgagcgcgtttggcgtaggggttttacggcgttttagttgttcgtggtcgggttgtagtagaagatttggtcggacgggcgcgcgcggtcgtcggggttcgcgggcgttacgtcgttcgttacgaagaggtagttgtagaggacgtataggtcgtagtttcgcgtcggcgcgttttcgggtagtcgcgttagttcgcgttatttttcggtcgtcgcgtggaagtagtagacggtcgcgttttcgcgcgcgttcgcgtttttcgaggggttttgaggtcggttgttcgcgcgttttttcgtcggttcgagcgtcgcggttaagaggtgggcgcggtcggcgcgtaggcggcggcgtagtagtaggtttcgttttgcgttcgataggcggtcgaatacggcgggttcgcgtagtatttttagatagtggtcgtttatgaagtagtaggcggcgtcgcgtagttcgtttagtcgttgtcgtttggtcgcgtttaggatttcgtagtagttggttaggtttagttgcggttttacggcgtcggtggcgcgttgcgcggcgtcgggtagttgtaggcggcgcgcgtcggttattatttcggttacgttgtcgggtcgtacgttcgttatgcgttcgttgtaggcgtcggcgaggagtagtcgtagcgtcgttaggtttattttttgtattcgtagtacgtttcgcgacgcgcgcgcgcggaagtagtcgttgcgcgtcgttagtatcgttttgtgcgcgcgtagtcggcgtttcgatatttttagtattaggttcggtttttcgtatatcgtttcgaatttcgggggtacgggcgcgggtttttcgggtttttcgggggacgcggggtttttaagttaaacgcgcggttcgggggacggcgtcgcgggttttttcgggtacgcgcgttttttaggggacgcgagttttttcggggacgcggcgttcgcgttgtcggttttttattgtcgttttattattcgcgggttatcgttggagggcggggaggtggtcgcgtttttcgtcgttgaggcgagggattgcggcggggattttttttcggagttgaagtatagggacgcgtcgagattgtagggtgtttgcgtcggggacgcggcgttttcgttttcgtttttttcggtagtttcgggtttagtttttgggtagaggacgtagggggttatcgcgtgttttatggtcgggttgtgttgcgttgcgttcgcgcgttttcggtttcgtagtttgtaggtttggttaaggtcgagttttatttcggggtttttagttttatagttttttttggtacgcga

SEQ ID NO: 11466 - DNA, 865 bp, synthetic construct
  misc_feature 1..865: note = Description of Artificial Sequence: Synthetic polynucleotide
  source 1..865: mol_type = other DNA
cgggagtttttttttttcgtgcgtcgttgttcgggacgagaaattcgtggggtatttaggattaggatacgaggttttagtttgggtaggtggataagttgtggggttttatttttcgtaggcgatggttttttaaagtttgtataaatcggtttcgtcgggtcggttatgttcgttttttttttcggcgtgggaagtttttttaaaagtggaggggagcgagtgtcgcgttttgttaatttcgattgcgtttgggtttttttcgcgtcgggtttcggagtcgttttttttgattttgcgattacggtcggggattttgcgcgcgttcgggaatgtagagtttttagcgtcgcgtagggttcgtttcgatttcggtcggttttgggtaattcgtttcgcggttagtttttattttaagatgtggttcggtttttattttcgcgggggggaaatgtcgggcgatttttatattgatttttttgcgtatttagcgtaaattacgaatttagagttggagttgttcgtagatttcgcgtagttagatttcgcgtttttatttcgtttcgtttcgtttcgtttggcgtattaattttcggtcgaggaggggtcgcgtggcgtcgcggggggcgggtcgcgtacgtttttcgtagggaggatttagggatagttagggtttcgggagagttcgcgcgtatcgttcggtttcgcggcgttagttatggcgttcgtgcgtggtttcgttagggatggggcgacgcggttagagtcgtacgcgatcgaaattcgtattttggagtcgtagagcgcgcggttttgttgtttagcggttttttggtaagtgacgtggggaagaaacgtagggcgt

SEQ ID NO: 11467 - DNA, 865 bp, synthetic construct; identical to SEQ ID NO: 11466
  misc_feature 1..865: note = Description of Artificial Sequence: Synthetic polynucleotide
  source 1..865: mol_type = other DNA

SEQ ID NO: 11468 - DNA, 1463 bp, synthetic construct
  misc_feature 1..1463: note = Description of Artificial Sequence: Synthetic polynucleotide
  source 1..1463: mol_type = other DNA
cgtaatttggggttcgtagacgcgcgtggatataaaaatatacgttttcgagatttatttttttcgggttatattgtggggttgcgttcggggtacgggttatgtttgaatttttttttatcgtcgcgtttcgggttcgcgtttcgtcggtcgttcgtattgggtttcgcgtcgttttcgttattatatcgagtcgtttagtattttttttttttgaaggttggtttcgttcggggtgttttttttttcggttttgtcgtcgttgtttattttttcggttttttttcgtcgggtcgggtagggttggggcgcggggttgggcgagggcgcgttagtttattggagtttttttcgggcgtcggggttttttcgggcgggcgtcgcgggttgtggggttggagttggagtcggggtagtggttgtcgggttcgggttgggttggggttttcgcggcgagtttgcgacggcggcggcgggcgatttaggaagtgtaagggagagacggggtagggcgcgggtcgggagcggggtatcgagataatcgggtttcgggagggcgatttggagagggagggcgggagttaggggaggaaggaagaaggaaggaaggaaggaagtaaaggatggggcgaggacgcgcgttttaggagtaagcgcggagagttggggttgggggttgtagtcgttggaaggaggggacgggggtgtttagagaggaggaggaggaggaagaggaggaggaggagcggggcggaggagcgcgggtcgcggttgggacgttgggattcgagagtcgttgagtacgcgttttaggtaggttttgggaagttcgggatggaagtagttttttttttttcgtttttttttttttttttttttttttttttttttcgcgtttttttttttttttttgttttttttggacgtgggttgtcggttgtagttcggagggacggggcgcgggacggagtttttcgcgggaggaggggtcggcggtcggatggcgcgcgtcggggaggggtagcgggtcgcgggcggaagcggcgattttagttttcgatttagcggttggtcggagggcgagggttcgggaggtcgagggtagggaggtcgggtttcgtcgtttttttggttttcgggggtttcggcgtttgcgcgtttcgggatttcggggattttgtttcgtcggggtttggatcgggatttgggatgtgtgcgatttttagtttgtcggtttttatcgagggatttgtatttttggttttaagtttatttttttcgagttagattcggttttttttttgttgtttgaatgatagtatgagaattcgagggatatcggggatagtttatttcgggtcggtttttttaggatagggttttaaatttatttttagcgcgggttttgcgacgcgttcggagtttttttcgtttcgttttttgagcgtttcgcggtttttcga

SEQ ID NO: 11469 - DNA, 1437 bp, synthetic construct
  misc_feature 1..1437: note = Description of Artificial Sequence: Synthetic polynucleotide
  source 1..1437: mol_type = other DNA
cggtttttcggagttgaggtttgcgcgattggatttaggggtagaatgagtgcgtcgggaattttaaaattttagattaagatataaggggagtcgacggttcggaaatttcgttgcgggtgttttaagcgcgaggtcgttcgggtagggtcgtttagggatcggggcgttgggtgcggggtacggggttttatttttcgcgggttggggcgcgtagcgcgcggtttttttaagaaagttcgtcgggcgagtttattaaagtttaaaaattcgtcgtggagaagggcgcgggggaagaggagagagggagagcgttgatttaggcgagagagaggggaaaggttcggtcggaggtcggcgtttcgcggtcggggtcggggcgagtttacggtgggcggtggggattggttgcgcgttttttcggagatcgcgcggcgggcgggggagggggttggtcgggttttagttgaggtcggtttcggtttcgtttttcgtcgtcggcgttcgttttttttttcggcgttcgtttttcgtcgtcgttgtcgtcgtcgtcgtcgtcgtggcgtattcgtcggtcgtagtgaaaaggcggaggcggcggttttttcggtttttattgtttttttcgtcgtattttttttttatttttcgtattcgttaaatttgatgtgattttggttcgacgcggaggttgttttttttattgtttcgtgggtttttcgttattcgtttcgtattcgcgagcgtatcgtttttcgcgtttttttttatttttcgcggggtcggcgtcgcgttcgttttcgcgttttttttcgtcgttttttttttcgtattatgagtaatttgaagtcggacggcgagtacggcggtagtatcggtatcggtttcggcgcgggtttcggcggcgttttggaggaggaggtgggtttgtggtttcgggatttgtcgggtgaagcgtacgttaggcgggcgcgggagagggcgagcggggtttgtcgcgtttcgcggggtcggggtggttatcgttttcggcgttttttcgtcgttgttttttcgttcgggtaggagcggttcgtgttcgcgggcgggagcgtgcggtttggattgtttcgtcggataggtattgttttttcgttttttcgggttcgaggcgggtcgcgcgcgtcggtcgtcgttcgggcgtttcgcggtgggcgagatgcgtcgcgttcgttttatgtttgtcgttcgcgcgttttttgttttttatttcgtagtcgttcgtcgttttttttcgaggcgtattttttgcgtggttaggatttcgtttcggcggtacggagcggagcgggattagtacggttcgagggcggtatttttattttattgtttttttcgttttgatttttttttcgtgattttggaggtttgggtcggtcggtttttcggtttttgcga

SEQ ID NO: 11470 - DNA, 717 bp, synthetic construct
  misc_feature 1..717: note = Description of Artificial Sequence: Synthetic polynucleotide
  source 1..717: mol_type = other DNA
cgaggagaaaggtcgttaaacggagcgagagtttttatttttatttattttagtgttatggtggtatatgtcgattattatttgcgaggttttttcgtagatttgttttttcggtttcgtagcgcggacgattcgtagcgttttacggttatggttttttttataggggtgagtttgtttttcggatgggtggtgaagggtgattttggatttgatttttgaatcgtagcggtttgtacggggatcgcgggcgtgttgattttatgtgtttcgtttagttgttgtagagtcggtttatcgtacggtttttgcgggaggaggttattttggagcgattttttatttggtagggagatttcgaatttattgtgcgttggttgggtttgttgggtttgggttatttcgcgttgaatcgtaggaaggtgtgagagaaggggaggggtggagaggggtttggttcggtcgcggcgaggtttgtaagaggttgatttcgagttttagtaggtgcggtacgtgagtacgttgttgtcggcgtttttgggcgtattgggcgaaggcgacgcgcggttcgtgggtgtagcgttgggcgttttgaggaggtttttgttgcggtttcgggcgtttgtgcggtttttgagcgcggagttgggatcgcgttttttttcgttattggacgacgtgagtaaacgtttcgttttcgggtttcgtttttgtcgt

SEQ ID NO: 11471 - DNA, 1713 bp, synthetic construct
  misc_feature 1..1713: note = Description of Artificial Sequence: Synthetic polynucleotide
  source 1..1713: mol_type = other DNA
cggtagcgaattaagttgcgtaggcgttttgtttttttttttattaatatgttcgattggtttacgattgattatattattggttcgcgtaattttagtaggtttttgggtttgtagttgagtcgaagtttttttttttgcgtagcggggcggggtacgatggtggcggggggggaggggggaattgttttattacgtatgcgtatcggggatggcgatagggtttttttttttgtttttttttatagttttttttagtcggggggttgagtgtttttttttttttttttttgttttttttttttttttttttttatcgtttagcggggtttttaattgatagttgtcgtcgggtttcgttcgtgtatcgtttttttttgttcgtgtttttcgtaggtagaggggggcgggagggggtgtgagggagaggaggagtcggagtcgtcgttgcggtttttttcggggaggggagaggagaatttttttttttttcgtttttttttagtttttcgttggttcgggagggggtggggcgtcgaggtcgcggcgattcggtagggtttggtcggtgaagagtaggcgggcggggtgcggaggggtgaggtcggcgagggtcgtgcgcgcgtcgtcgtcgggggggaggggagaggagggtatttaggttttttttttttttttttttttttcgcgcgttatgtaatttcgtttcgtcggcggtgagtttaagattttcgcgcgtatcgagtcgagtcggcggttgaggagagttaggttcgatgtggcgggggttacgcgtcgcggtcgagtcgtgaggaagcggttcgcgtttacgcgttttttagtatttcgagcggttgttttatatcgtttagtttaggtttgtcggggtatgagtgtgttcgggacgtcgggagcgatggagtcggttggggaggaagagcggtcgttatcggcggtcgaaggagaggacgacgaggaggaggtggtagcggcggtttagattttagggtcggtttacggaaggagtgttttttcgttggaggacgcggacgattaggaggaagagatggaggcgatggtgatcggaggcggttgttgtaaggagtaggagttgatttacgagttatagtagggttatcgtattttgggcgagtttttgtaggagaagtatcggggttttatcgttttttttttgtagtttttggggggcgttgttatcgcggaggaggaggtggcggaagggtcgcgtagcgggggtcggggcggtcgcgttttttcgtagtagttcggatagggtatgtgtttgttgtagatggaagagaagttcgttagcggttagtacgggggtattatcgagttcgtggcggattttaggttgatgttggagacgtgttatcgtttgtacggagtggattattggatttttaaatagggttagaagttggagatgatgttggagtagaagttagcgtttttttttcggtaagcgagttcggttttcggtgggattgatagattgatataaatatatatttatacgtgttcgaggatgggttgggttaggggtttgggggcggcgttgataggtgttgagtcggtgttggagaagttcgggaggaggagcggcgttgggcggggatcggaggggtgtggtgggtgtgggtcgaattcggtttgcgcgtagattgagaaggaaattcgagtttgtagcgt

SEQ ID NO: 11472 - DNA, 699 bp, synthetic construct
  misc_feature 1..699: note = Description of Artificial Sequence: Synthetic polynucleotide
  source 1..699: mol_type = other DNA
cgcgcgaatcgttttattttggatttttggaatcgtgtttaggtattcgggcggcggggttcgtttaggtcgcgttaggtagttttgggtcggtgggtgtcgggtttttttttttttcgttttatttggcgcgttcgtagcgtcgtcgtcgtcgtcgtttttttttttagcgggcgttcggagtatttcgcgtcgcgtttttttcgtttcggttttcgttcgtcggagcggggtttacgtcgttggtagttattaagtggttcgttaaggaaatgtaggtgagtgcgtgaggtcgagcggtagttgttggagacgtggggtgtgtgtttgtgagtgcgagcgagacgaggagggagcgttagcgagcgagcgagcgagtgcgggagcggtcgtttcggtttttcgtttagtcgcgttcgtagtcggcggtcggagcgcgtgggggtagcgtttcgtttcgatagagtttcgttttttttttgtcgtttcggttgttttttcgaggagtcgggagtcgtttatcggtttttttaattttgcgttttttttttagttcgagttttttcgttgtttttttttttttttttttcgagtttttttttttttggcgcggcgtcgttagttagtttcggcggggagagtgtaggtattttgtttttagaataattagtaggatttaagtcggtttttcgagcgcgt

SEQ ID NO: 11473 - DNA, 1191 bp, synthetic construct
  misc_feature 1..1191: note = Description of Artificial Sequence: Synthetic polynucleotide
  source 1..1191: mol_type = other DNA
cggagcgggcgaggacggttagtttttgtagtgtttaggtttgtacggaagcgttttggtataatttagttgaggatatacgttttttttcgcgtagtcggagggttgaatagtaaagtatttttcgggggaattgtgtgttagcgtagtttggagagagtaggtttagggggtagttttattataggagataggatacgttttagtttgggtaaattttcggttttttttggttttaagttagtagtcgtcgttcgcgatttttttttttttttcgtcgttatttcggtcgttttgttagtttcgaatttgttcgcgtttggtcgcgcggttttttagtttacggggttggcggcgcggttgggatgggatcgatgtggcgtatgcgtggtggcgttattaggcgcgggagttgttgcggcggggacggtgttgcggacggtcgagggttaggtcgtttcggtcgggtttgtggtgggggtagttttagcggcggcggcggcggcgtgggttggcgaggtcgcgcggacggcgttcgatagtagttggaggagcggtttgtcgatttggcggcgagttatttggaggttattcgtgcgcgggacgagtgggatcggtagaacgcgcggttgcgttaggagaacgttcggttgcggttcgagaatcggcggttgaagcgcgagaatcgtagtttttttcgttaggttttgcggtttttcggcgaaggcggtaacgggacgttcgcggaggtacgtcgggtttttgaagaggttagtacgaatcggagggttagagatagcggtcgagaggacgagtcgggtagttttagggttttgagggttcgatttgagaagttggaagttatgtatcgtcgggttttgttgtagttgtatttcgagtagcggggattacgttcgagcggggataaggaggagtagtttttataggaattcgatttcggttttcgttttcgggattcggagttttttgggttttggttgtagtcgaggtcgtagtcggtgagaggcggagtttcgagcgggttttttttttttcgtttttagttattttcgatttcgcgtacgttttggttcgttttttgttcgcggatattttggattacggtgttttttcgtttttattagtggatattttcgggtggcgtttggttattcgtttggtggaggtcga

SEQ ID NO: 11474 - DNA, 536 bp, synthetic construct
  misc_feature 1..536: note = Description of Artificial Sequence: Synthetic polynucleotide
  source 1..536: mol_type = other DNA
cggacgggatgtaaagtttgggtgagacggttatcggacgtttattggaagggtgcggggatttttacgtcgatatttcgttttttcgttttagttcgcgtatttatcgcgtacgtagagtagtgatatggtcgaggatcgggtaagtttttgtcgcgttttagtcgcgtcggatcgttttttttttttttttagtaggtgtcgcgattgttttcgttatcggttttacgggtttggtagttttttatggtttcggtcgtaggtagcgtttcgtcgttgtttcggattcgttttaaattttatcgtttgagcgaatttcgggtagcggtgagtatcggtcggtaggttggggattgggcgcggtatagcgacgttatcgttgggaggtaggagttgtcgggattttttttcgttattttattcgggattcgcgcgagcgtttgggcggagttaattcgtggtgtttcgttttttagttaattaatttacgtttagtttatcgatttcgttttttttcgcgagtacgtaggaggcgg

SEQ ID NO: 11475 - DNA, 728 bp, synthetic construct
  misc_feature 1..728: note = Description of Artificial Sequence: Synthetic polynucleotide
  source 1..728: mol_type = other DNA
cggttaatacggttaggtttttcgggcgttttaaggtttcgttaattttggtaaaggcggtgttgaggtgaattacgtggatttgaaaaggatacgagggtaggagagggttacgtttttggtttcgtttcgtttcgtttttttgttttttttcggttagtttcgcgtttatttcggtagggaaacggtggttttttatagtgtgtttcgagttcggacgatttgtagttttttagtgtagatgtagttgtagagttcggtattttcgttcgggatttagagttatttttagtttaggaggtagggttagttgtattgcgtagggagaggtaagtgagtcggtttcgttcggtagggttagtttaattttcgggtaggtattgtcgcgacggtttttttttttgcgtttcgttttatttttaagtttcggcggggagatttttttattattgtggttattgttgcgtaggcgtagttttgggagcggcgggagttggaagtttaggagttttagggggcgtagggtcgggtagaaggcggcgagttgggggcggatatttatcggggattggaagcggttcgcgtaggttggggatattcggggttagggcgggtcgtttggggtgggagagtatagtgaggaagtttgacgtttaggttaggaatttagggaattcgggtagaaaaggtgagggggtgggacggtgggcggcgggtgggacgttcgg

SEQ ID NO: 11476 - DNA, 1431 bp, synthetic construct
  misc_feature 1..1431: note = Description of Artificial Sequence: Synthetic polynucleotide
  source 1..1431: mol_type = other DNA
cgagttacgttgtttttttgggagtttatcgtcgaaattaaagttatttttcgtcgggagtaggtaaaaggatgaggggaaagaaaattaacgaattatttttaggaattgacgtttttgttaatgattcggaagaaataaacgtagttttttcgtttcggttttgggttagtttacgtgatttttttgggaggttaaagagtatcgttttgttttttttgttgttaagttaagttattttacgcggcgtagtttcgattttttcggtttcgcgtagttttttttttaaattcggagaataagttttatttttttcgaaatgagaatttttttattggttcgaatgtgtagtttattaaattaaaggggcggggaatttttgtttttattggtttttttttttcgtaattttcgttttttgttgagcgagtttagtttttttttgagtttagagcgttttttattttgtcgggcggtttttgattggtggaagtgaggtaaggttgggtttcgttttttttttcgttcgttagtaggttggagtcggggttagttttggtatttttttttagttagtggttaatttttggtttagtggggattgtgttcgtttttttcgtttttttttagtttttttttcgttatcggaacgagtttcgcgtttggtaggttgaggaggagtaaagaaagtaggattaaagagaaggaagatttggttaggtttgggtggcgtttgtagtgttagaaagggaggcggtggcggcggcggttgcgattacggtcgcgcgggacgtgaggttcgagagtaatcgacgggtagcggcggtcgttttagcgtttcgtatcggggtcgttagttagtagaacgcgagtttttgtggaggagtagggtcggcgcgaggcgagattcgggagcgtgagcggggtttttggggcgtcgtcgttttttttcgtttcggcgtcgggggttgtagttttggttttcgtttttttgtcgggttagtttgtaggcggagagagtcggacggcgttcggagcgcggatttcgttttgtggaggatagcgcgtcggttgcggttttttttcgattttttttgttcggcgtttcggttcgggtcgtttaggtgtaggtgcgtgcggtttcggggtttggggacgtcgtagttcggttcggggagggggcgttaggtcgggagtcgtagcgcgggagggacgagttcgggtcggcggggggaggggagcgggaagcgtttttgttgttggcgatcgggattttttttcggtataggggaaaggcggggaagttattttttatcgggtttgtgtttttgagaggattttttgatggttgcgtgaaggggagcggtaggatagtttttgcggttcgtggagcggtcggagttagggggtgggggagggaggatcgatcga

SEQ ID NO: 11477 - DNA, 588 bp, synthetic construct
  misc_feature 1..588: note = Description of Artificial Sequence: Synthetic polynucleotide
  source 1..588: mol_type = other DNA
cgatttattttgcgagttcgggtgggagttttaggtttgtaggggtcgcgtggcgttatttttcgatcgcgatttttaatggcgagttcgtgcggtttttagtgcgtcgtttttttttgcgggtcggtggggtttgcgagaattcggggttgggggcgggtttggtagtggcgggcggggatttcgggtcgggatcgagaagcgttttcgaacggtagttatattggggttgtttagtggtttgagtttttttttgttttttttttatatttttttgttttggcgcggggggttttcgcggcgtcgaggtttcgttgcgtcgtttattcggagggaggagggtttttgggaggcgtcgcgtgggggcgcggttcgtggagttcgggcgttagggatcggtcggggtcggcgtacgggtgcgttttgggttcgttcgggtcgtgggagttagggagttagggagttagggatttcggttttcgtacggggtagataggggtagcgcgggcgattcggagcgtttgcgttttcgcggttttttttttaatagggtaaatttaggggtttgatttcgcgtttgttttgcgg

SEQ ID NO: 11478 - DNA, 1203 bp, synthetic construct
  misc_feature 1..1203: note = Description of Artificial Sequence: Synthetic polynucleotide
  source 1..1203: mol_type = other DNA
cgtttttttgaagttcgttttttagcggtttggagttcggggcgtggtcggttcgaatttgttttttaggtttagaacggagttcgtagttcgtaattcgttgtggtcgtagcgggtcgcgtttttcgttttcgttttaggagcggtcgaggatttgtttagttgcgggcgttaagttttggtcgtattttttttttcggcggagggagtcggttggcgttgcggtttttaaggcgcgcggacgtcgcggagggtagttagtcgcgcgggagcgggtagcgcgcgcgagggcgttgggcgtcgtcgcgaggcggggaagcgcggggtcgcggcggtgcgggttttagggcggcggtcgtcgtcgtcgtagtagcgtttcgagcggggagggtcgaggaggttcgacgagttggggatggagagtatcgggttttttattgttttagagcgcgtgtgcggttttgggcgcgtatagtgacggtgacggtatttttggttcggtagcgtcgaggtcgtttcgttagatagttagcggtcggcggtaggtcgggttatgagcggtaggggtcgggtcgggtttcgttgattttggtttcgcgcggtagtttttttagttttcgtttcggtttttcggtatgagagttcgttcgggttcggggttgcggttgttttagattcgtcgtacgttggcgcgtttcgggttcgcggagtcgcggtgttgatatttgcgtcgtattgcgtcgttcgttcgttcgttgtgtgtttcgggggcgcggttatggaggtggtgggtgatttcgagtatagtaagagggatttcgtgggatacggggttttcgtcgtggtttttcgggggcggtatcgttaggtgagcgtcggtcggggcgaggtcgggtttcgggcggtaggtacggggttaggtggttttgaaatttggcgtagtcgcgagtcgagattttcgattcggttagtcgttcgggtatgttattgtgcgcgtagttcgtttcgtcgtttgttttggttttgtgagggttgttgtgaggtttaagtttttggtagcgtttcgtttatcgatcggttgttgttgatttttttgtgtgttcggggtttatttcgcggttcgttcgtaggagcgtttgtatttaggttattttggatttaaaatagacggtattgtatcgtgtagattcgagggttgggcgt

SEQ ID NO: 11479 - DNA, 5370 bp, synthetic construct; identical to SEQ ID NO: 7304
  misc_feature 1..5370: note = Description of Artificial Sequence: Synthetic polynucleotide
  source 1..5370: mol_type = other DNA

SEQ ID NO: 11480 - DNA, 1691 bp, synthetic construct
  misc_feature 1..1691: note = Description of Artificial Sequence: Synthetic polynucleotide
  source 1..1691: mol_type = other DNA
cgagaataaacgttagtttttatttttgtggaacgtttaacgtagttggttgggggaatacgaggttttgtagggagcgagtttcggtttcggtttgacggaatataggcgacgtacgtgaagtttaggttttattttagcgtaggcgggtttttagcgatttatagttgttatatattcggttagcgtcgattttcgaaggcgtattttttatattttatttcgagtatcggttttatcgttagggaaggtttttttggatagtaaggtcggggtttaggatttgcgagatttattttattcgtttcgttagagtttaggagtagtaataggtttgcgtttttttcgggcggcgttttgtagattttcgacgggttaagggtgtttttagtttagtcgtgcgtttaggtcggggagatgggcggaggattggggttttcgatttttttgatagtttttgcgcgttagaaattgagtagatacggggttcgcgttatttcgttcgtcgtttgttttatttcgcgaggttgcgtttttattcgggttcgggagggtcggttcgcgtttcgggtatgaatggggtttttttttttaatagcggggaaatttcgttatcgttttttatttcggttttcggagttcgcggtggcgtaggtttgtttagtaagtttttgaatcggtagataaaggggtatcggaggaaaagtcgagcgtttttttaaatttatcggttatttttttttttttaaaataaaggagtttttcgtcgattttcgttttttttcgtaaggcgcgtcggtatttcggggagcggttatttcggggtattgtttaggtttttgggagcgcgtcgtattttagttcgagcgtcgcggggatagttggcgatttgtatttataggagttttaggggcgggtggagcgttcgggcgtttcgagtcgtcggtcggattttggagggttagcgcgggattcgttttttcgtagaagtttgcggatttcgcgttcggttcgtcgagttttgcgtatttatttcgtcgcgagtagcgtaatttgtggcggcgtcgcgcgttcggtcgcgtttcgaatttttttttagtcggtagttttcgagtttcggtcgtgcggcggtcgaagagggttcggcgtttcggagtagtcgcgcgtcgttttcgggtcgttttcgtttcgtcgtcgtcgagtttcggagagagcgcgggcgttggaaagtttcggtggcgaatggcggtttgagggcgttgcggcggcggcggggcgggggcgttggcggtttttcgtttttaagcgcggagtgggggcgttgaggcgggtgcggcggcggcggcggcggtagcgggagagggcgggatagcgggagggattggtacggatagtgatttttacggggagttgtcgcgagcgcgcggattttagttaggaggatcgttaggggttcgttttcgtcgtcggttttttttttacggtcgtgggaggggattcggcgtattattcggtttcgtttttgcgtttcgggggagtcgcgtttcgaattagttttttttttacgagggtagggatttcggttttgtttttttttcgcggtttttagtggggattcgcgttttaatttagtttttgttttacggtcgggggattagcgtttttattaagttcgtttcgtttttttacgt

SEQ ID NO: 11481 - DNA, 1223 bp, synthetic construct
  misc_feature 1..1223: note = Description of Artificial Sequence: Synthetic polynucleotide
  source 1..1223: mol_type = other DNA
cggaatgttatttgtttcgattgttttcgggtggttataggcgcgggggaaggcgtagggttaggggcgttgagggtgaaacggtttcggcgttcgggcggcggcggtggtcgtttgcggtagtttagttgaaacgtagcggaaattgtagttagttacggggttgcgggaggtaaggtaggaaggtggcgttgtcgtcgagcgtttggagttcgagcgtttattatggcggtaagggtaatggtcgttacggggagcgagtacgttttttcgcgcgtatacgtcgtcgcgtcgggttttcggggttcgttatcggcgtcgttgtcgtcgtcgttcgtttttttatttttttttacgggttgtagcggaattttttttttagatatcgtttttaagatggcggttttttttttcggtaattttttttatcgttttttgtagtaggcgtcgagtcgtcgttattttgtttttcgttttttttttttttttatcgatatttatatagcgaaaatcggttcggtcggtttgcggtttttattttacgtttgtagttttcgttttttcgttaggttttatttcggcgcggtgttttaggtcggtcgcggagtcgattcggggtttttcgatcgttttcggtataatcgggcgatttttttttaattttcgttcgtttacggagcgcgttttcgtcgtcgttcggggtagtcgggttttttttcgggtttaattgcggttttttcggggtttgttcggcgtcgcgcgttacgtcgttcggtttagcgcgggagggcgttttgcgggtcgtcgattaggtcgagattaggtcgttgtgcgcgtattaggtttcgcggtcgcggcggtattcgggatttatcggacggacgtgcgggcggtcggcgacggtggcgggtgttgtaggtcggtttttttttggagtattgggtcgggtttcggttggtggggcgggcggagggagggaggaggggtcgagttcggagttgataaaaagcggtttagtttttcggtacgggttcgtcgttagtacgttacgttatcgttcgggagagagatttaggaaaatgcggaagggtagataggttttttttttcgttcggtgggtttttttggtatttcgtgtcggcgtcgttttcgtttcgcgatcggggagtttagtggtttcgttgcggcggggttttcggcggtcggagttttcgtgatagcgt

SEQ ID NO: 11482 - DNA, 1103 bp, synthetic construct
  misc_feature 1..1103: note = Description of Artificial Sequence: Synthetic polynucleotide
  source 1..1103: mol_type = other DNA
cgaggtacgtattaggggggatttcgtattcgtagtttttcgtttcgtatttcgtagttcgggacggtttttggttttcggttttagcgaggtcgtcgaagtcgtagtatttagttttggaaggttaggtagtcgggatcgtagggattagtttcgagcggcggcggcggcggggtagaagggtagtcgttttttcgggatttaggacgtcggcgggcgggaggtatatacgcgcgtataagcggaaagaaagcgggtttattgcgtggggatgttcgttcgcgtagttgtttcggcggcggcggtcgttgtttgtatcgaggtcgaggcgcggcggtggcggcggcggttgcggattgagtttttttcgtcgggcggtggatgtagggcgcgggaggggcgcgaggggaggggtgcgcgtttgggaggcggggagggaaagaggggaggaagtaggagcgcgggggcgggcgcggttagttaggggcggggcggggcgcgcgcggggtcgggttttgtttattgtacggaggttgtgtgcggggcgcgcgcgcgggagacggtcggacgggcgtggggagaggggcggtttgttacgtatttcgcgcgtttacgtgttttcgttattggagagggtcgggtacgcggagagggtggttgcggggacgcggtggtaggttttttttcgaggatcggttcggattcgaagatcgggaggagggcgggtcgggggcgtttcgggttttttttttcgcgtagcggtttttagaggtttgcgggagttacgaattattgtaggcggttggggttggggaggtgggagtaataaagatagttaagtgagggtggcgtttcgttttatcggggttttcgttaatttgcgtattttttgaaaagcggtttcgtttcggggtttacgtcgtttcggttttcgatttcggaattcggtggtttgtagcggcgtcgaaaggtttatcgacgatttttttttttagtagtaagtcggagggagttaaataagttttatttataattttagtgttattatttagagcgttttaacgttatttagaaagtatcgatggtaaagcggcgcgtggcgt

SEQ ID NO: 11483 - DNA, 616 bp, synthetic construct
  misc_feature 1..616: note = Description of Artificial Sequence: Synthetic polynucleotide
  source 1..616: mol_type = other DNA
cgtatttaatggcgattcgatagttttatttggtatcggtgttcggttcgtggggcgggtggagggtcgggtagtcgtagggcgcgggttttttcgggtggacggtgttcggtcgggtcgggtcgggtcggggaggtaggcgcggggcgcggggcgcggtgtatagcggggagcgcgtagggaggcgaggaggcgcggattgggtttcgttcgtaggagaataaataggtttttttcggtcgttcggagtttcgtttttcgttttttttttcggtcggtttttttttttgttttttttggggtaggtagaggcgtttggtatatttcgtatattttttcgttagcgtttttcgttcgttcgttttttttcggtttcgtttcgcggggttgttggagaaattaagtttggggttttttttgtcgagtacggggcgagttttagaaggttttgtcgtgatggaaaatttttaggtaaattttttcgggttcgtggtttttaggtcgggaagttttcgttacgtgaagggttttcgtttttagttgcgcgatttggtttcggtatagggttaacgatttttatagatgttgtcgggttaatttagtcgagaattatcgt

SEQ ID NO: 11484 - DNA, 206 bp, synthetic construct
  misc_feature 1..206: note = Description of Artificial Sequence: Synthetic polynucleotide
  source 1..206: mol_type = other DNA
cgttaaaggcgacgtgtcggtcgttagttttaggtcgagtttcgagcgtttgtaggaatacgtttttttattcggcgcgggacgtagagttgcgagagaattttgtttagcgcggatttaacgttagggcgtcgtttagaggttggtttttgtttcggttttattcgtcgggagattatagagttgtttttttagtcgttcgtcgt

SEQ ID NO: 11485 - DNA, 1141 bp, synthetic construct
  misc_feature 1..1141: note = Description of Artificial Sequence: Synthetic polynucleotide
  source 1..1141: mol_type = other DNA
cgtattaattggcgtgtgtaggcgttgttgtttcgcgttgcgtacggagaagcgtttcgaatttatcgtacgatgcggagttaggggtagcgagtgagcggcggtttttagtttttttttgttttttttttgttttttttgggaatggtagggggttttttatgataaatgttcgtaaataggatagggttcggacgattttagagtcggcgttttttttttatatttttagttttagggtcggattcgttttcgcggttgttatcgtttttgtttcgggcgtttcgcggggattatttcgttaggtgagcgtttttaggagtttttttgaaatttatttgcgtgaagtataagtttattagcgtgagggtgaaaaattgtaggtatatagggaagtagtagagtagttagaagacgaaggggttgagcgaattggtcgttacgaagtttttgaagtagaaggagaagaggacggttcgtagggaggtttagaagaggtagagaaagaggaagacgttttggtagttgagtcgtttgtggcggtaacgtagtattagttagagttgtacgtagatgaatacgaagagtagcgcgtagaatacggtgtagacgacggtgaggttaagttttacgtaggggggtacggtcggggttagcgtgggcggtagcgagtcgttgcgggttgggttttacggcggggtttttatcgggtcgggggcgttgtcgcgcggtcggggacgttcgggttttatcggggtttacggtcgtcgtcgttttcgcgggggttttcgcgtatcgcgtttagtttgtagtttcgagattggaggaaagaaaataagtcgtattttttttttcggtattatatgatttattgggacggtttttgtttgcgattggtagcgtcgcgttcgtcgttttcgcgcgtcgatcggtttcgcgcgttttcgtttcggttcgcgcgttttcgtttcggttcgcgcgtttcggttcgttttttttcgggtatcgcgcgttttcgtttcgcgaatttcggttcgttttattttcgttatcgcgcgttttcgtagtgcgcgtttttagagtcgtacgttttttttcggttttttttttattttcggggtcgcgcgtttttagattgcgg

SEQ ID NO: 11486 - DNA, 1819 bp, synthetic construct
  misc_feature 1..1819: note = Description of Artificial Sequence: Synthetic polynucleotide
  source 1..1819: mol_type = other DNA
cgcggacgtaggacgtagagttttagtatcggtagttaagaggacgtaggaaagcgtacgtatttataggtttagagacgcggacgttagatttaggtttggatagagtagtttcgtaagttttaatatattttgtaaatttcgaagataggagagagttaaaatattttttttgttcgtacgtaggttttttttgttttttacggttcgattttgggaggcggatgaggatatttttaggtttggatgggggttatgggatattttattttagattttgttacgatttgggttgtgttcgttcggtgttttcggtttacgggttgtataatttggcggtttcgaaattggcgtgggggaggggagggttgtttattcgagtaggacgcggttgtttatttagtcggaggtgaggaacgatttttttatttcgttgtcgggtttaagcggggttcgagagtcgtcggggagagttaaagggaggggatcgatggattttttagagtgaaattgtgcgttttggagagtttcgaggtagtttcgcgagttttcgaggaggtcgttgtcgtttggtaaatataaataataataaaaggaaggaaatttaggcggtagtgcgtagaacgagtatagggttttgtgagggcgcgtagggtttacgcgggtgtttttaatagggttttttacgtaggcggcgcgggtacggggtcgggggcgcgcggcgtttttagcgggagggcgtttggattaggggtttcgtttttttttagcgtattttcgtttttttttagcgtattttcgtttcgcgttaggtttattcgtagggttttttttagtacgttcgcggtcgtagtagttagtttagtatttattttcgaagttcgaaatgattttatttagttgcgcgttgatcgcggggttcgatatgatggttggtgggtagcgggtcgcgcggagggtagcggcgaggaagcgttttcggcggggttcgggttttgcgcgttggttggggcgtcgcgttcgcgtttttgtagtgtagagttagtcgtcggaggagtttttaggttttttggtttagttgaatgaatgggggaggaaggcgggcgtcggttttttttcgcgcgttgcgttttcgtttcgttttcgtttttcgggcggattaggttttcgtattcgtatcggtttttttgtttcgtattggttgtttcgttcgtttgttaaggttaggtttggggggttggggttcgagtggtcgttgggggatagttttgggtatacgatcggagcgtttttttttttttcgtttggttcgcgtttaggggacggcgagagacgcggttttagttttttttttcgggcgtttcgttgcggttagatgtgggcggatgtggaggtcgggttatggcgaggagggcgggcgtttagaggggaagagattttttttttttttcgggcgtagggtttttttgtaggaggttgtatttgggtagttaaataaagttttttgttatcgtcgtcgcgcgttttgcgtttgtaagggttaaacggtagcgtacgcggttggtaggtaggatttcggtttgtgggtttaagagtcgaggggcgtagggcgaatatgcgagttttatggtattagcgagaggttattaatttttatttatcgagggtatttttgtagttaatatttttattacgattatcgtttcgggggttatcgttgtatttttttgggtgagttttggagaaggtattgttcgggagaaggggtatagggcggggatggaatacggttgttagagaagttagggacgggcgacgt

SEQ ID NO: 11487 - DNA, 1813 bp, synthetic construct
  misc_feature 1..1813: note = Description of Artificial Sequence: Synthetic polynucleotide
  source 1..1813: mol_type = other DNA
cgagtttattttattaacgttaaattcgttagtttcgttagtcggttgtaggatcgagggagggtgtaaaaggcggggggcggagggggggtagattagattaggcgaaatttaataagtttttagttttttagtttaaagtttttattatcgtcgttattaacgagttattttaattgagttagtatcgtcgtttattcgtcggttcgtcggaatcgcgtttattttttgtaatttcgttcggatcggtatttcgttttttcggttcggttttttttttttcgtcgggtgtaaagttaaagatttagtaaggcgacgtgaatttttgtatgtagggtatatacgtcgttttcggtttcgggagtgcgggggttcgcggcgcggagggaggttgggcgttcgggttttcgggttaaggtcgtcgcgcgtgtttatttatgtttcggcggtttcggtttcgttggtttcggcgttcgtttagatttcggttttcgtcgttcgttcgagtttttaaaggtgttgttgcggtaattttatggcgatgagtatttgttaaacggcgagtcgcgagttggtcgttttagttcggggggcgtcggggttttcgggcgcgcggaggcggcggcgagcggcgggcgtttcggtcggtttcgcgtttttcgttcgattttgtcgttttcgtcgcgttatcgatttatggagagagatattaagggggaaaatggcgttttcggagttcgaggagttttggagtaattatatttatatatatacgttcgtacgtatatatattcgtatatattggtatataggcgcgcggcgagttttgttaattttagtaggagttaaaaaaaattttatatatatatatatatatatatatatatatatattttcgttttttcgattaatgttttttttttttttgtttttttttttttttttttttttttttttgtttttttttaaaggatgggttggagcgttaaaaaatgttggtgggtttgggttcgtaggaggcggcgcgcggagggcgagggcgtttttgttgagttgtgtagttcggttcgttgagttcggcggttttgttcgttcgttcgttcgttcgcggtcgttagtgttgtcgtcgtcgtcgtcgtcgtcgtcgttgttgttttatggtcgcgttcgtttcgcgttttcgtcgcgtttcgtcgtcgttcgttcgcgttttcggtgagcgttggagtggggtcgggttcgtgtgtttgtttttcgcgtttttttcgaatttcggatttttagtgaaaggaagggggagggcgcgggcgcggaagggaggtggatcggagcggtagcgcggtttagtcgaacgggtatcgatcgttatttcgcgatttttttcgtagggggcgtcggcgtttaagttgttcgttcggagggtttagagtcgttttttagattagagtcgggggaggcgtagttagtagcgagttttgagcgatttttttttttattcgtttttttgttttagtgaatttttgttagttgaagggagcggggtttttgttcggggaaaaggaaaatagttcgtggtttgggatttgggattttttgtcgtttttagcgtttttttcgtttttcggcgtttttgcggtttagtggtttttgcgcgtcggagttcgtcgcgaagattgagcggtcgcggggatcgtcgcgggtttcgcgcgtatttttgggtttaatattgttattatttgatataataggagtagtgtcgggggggtattgcgcgtttagacgtgagttgtgataggttttcgaaattgggcgt

SEQ ID NO: 11488 - DNA, 1872 bp, synthetic construct
  misc_feature 1..1872: note = Description of Artificial Sequence: Synthetic polynucleotide
  source 1..1872: mol_type = other DNA
cgtggatagaaagtacgcgtaaggggtttcggggataggaagttattagtttggggagcgggaggtattggatattttttcgtttcgcggtcggtacgggtgcgcgtgcggtagcggcggtaggggtttttcgttttgttcggggttttcggtcgtgtttcgtcgttcgggtcgcgttcggggttgattcgtattattttgtaaggaagtgaacgtttcgtacgggaaggggaggcgtttgcgtcggtcgtcgcgtagtttcggggacgttcggggttgtcgtcggttcggggtcgtagacgatcgcgggacgcgcgagtttttcgtttttttttgttcgtcgtttttttcgttatttttgttcgagaggagttaaattcggtttttagagttcggggagggtggggatattcggtgtttttttcgcgttaggaggaagggggagggcggagaggatttttggttagtttgcgtcgagtagatttaaattaaaataaaaagattaaaggagtagcggtcggggcggtagcggtttttaggtcgggatattcggggtggtgcgttcgggtttgcgggggttgcgtcggcgtcggggaggcggggggagcgggagcgggcgacgcggggaaggggggagttagggggagggcgtcggtcggaggaggggcggattcgttcgttttagtcgagtagagtatagtcgagtcgagcggttcgggcgggggtcgatttcggttagcgtcggcgtagagagcgggcggaggcgtaggttatgttgcggttggtgtttatcggggttcgggttatcgtggatatgtcgtacgttcgttattttttggatttttagggtttcgttattttttaagttatgtagaagttggtggtgattcggttgagttttaattttcgcgaggtcgttattttgagtcgggattgttcggtgtcgtttttcggggacggagattttttcgttcggaatcggtgagttcggcgttttttaattttacgttttcgttttcgtttcgggttcgcgtcgcgtcgcgtcgttttcgtagtttttagttcgttcgcgtgtttatatttcggcgcgcgttcgggcgtatagtttgagtttgcgagatttcgggaagttgaattcgtcgttatttggcgaaggcgaatgtgatgtgattgttgttggtgtgaatattcgatgttatcgaacgtttttataattgagggttattttaatttgggatttttttttttttttttagtttttttttttttttttttcgtttttgaaataaaatcgacgggatttagaaggggaggtttttcgtcgggtcgttcgcgcgtatttatagtttttgcgttgatataatttttagggtggagcgggagtagtttggacgtaaattgcgacgtttaggtaaacgtgtttcggaggaaggaggttgggattcggttggttttttttgttttttttaggttggtagtcgtttcgtagtggcggagtttgtcgttggatgtgtgggtgtgtatttcgtcggtgttgtttgcgtgttgttagtgtagtgtgattgttgtttgttttttgagtgttaacgatcgtcgcgtggcgcgtgtttcgggtagttgggttagggtcggggtgggggtatggttgtttttgtcggtacgttttgtagatatttaggtgatatcgggttgttgcgagattttttggtttttttatttttcgcgttttttatcgtcgtgttttcgttttatttatttttagtaattggcgaagtaatagggaggaaacggattttattttttatcggagttatgttcgtttaggtttttgtttcgtgggtttttggttgttcgatttgattggtaaggcgt

SEQ ID NO: 11489 - DNA, 652 bp, synthetic construct
  misc_feature 1..652: note = Description of Artificial Sequence: Synthetic polynucleotide
  source 1..652: mol_type = other DNA
cgttttttcggtggagacggcgacgtggtttatacgcgagtttttcgtcgaggatgaattattagttagttcgagttgttatattttattttagtatagttatcgcgagagtttcggggtcgcgtcggcgtgttttacgtacgcgtagtttttcgcggggtcggttagtggtgtcgtcgaggcggggggagtggtcgtcgcgtcggtcgagtgaggtagggttatacgtaggcgtattcgcgcgtcgatagttcgtgtatcgtgtggtagcggttgtgcgcgtttaggaaggatatttcgttttcgtaggtcgtcgggcggtagtagggttgcgcgcgtattcgttttcgtcgtaggcgtcgtcgttggcgtagtcgtcgtagttcgaggtcgtagacgcgcgcggtagtttcgtaggcgtttgcgtagtagcggaatagtatcgtttcgtcggacgcgtagtttaggtttagttcgtttacgcgtatttttagttcgcgtagttcgtaaggtcgcgtttttaatcgcgtacgcgcgcgtcgtcgtcggggtttcgttcgacggcgcggatttgggggtcgtttagtttagggcgttagttcgcgtagttttatcgtattcggggttttttgtaggagtgtacggtttgcga

SEQ ID NO: 11490 - DNA, 722 bp, synthetic construct
  misc_feature 1..722: note = Description of Artificial Sequence: Synthetic polynucleotide
  source 1..722: mol_type = other DNA
cgtttttcgtagcggtgtagcgcggtcgtatttcgtattcgttgtttggtgtcgtggtcgttttttcgggtagtttttcgggttcggcgttggcggtagtggcgagcggcggagattttttttcggggtagtcggtgttcgaattgatcgcgtagttgttgcgcgttgagttttattttgcggcggtcggacgtttcggcgtagggggcggcgcggcgggcgcggtgttgggtatcgataacgtgtgcgagttggcggcgcggttgttttttagtatcgtggagtgggcgcgttacgcgtttttttttttcgagttgtcggtggtcgattaggtggcgttgttgcgtttgagttggagcgagtttttcgtgttgaacgcggcgtaggcggcgttgtttttgtatacggcgtcgttattggtcgtcgtcggtttttacgtcgcgtttatggtcgtcgagcgcgtcgtggtttttatggattaggtgcgcgttttttaggagtaggtggataagttgggtcgtttgtaggtcgattcggtcgagtatggttgttttaaggttatcgcgttttttacgttcggtgagttacgtttcgaagagggtcgcgggatggggggatttaagggaggttaggaggagggcggtttggatttagatttcggtttttatagcgtttcgttcgttttttaggtttggggttttgtacgcgtcgtgagtgaacgt

SEQ ID NO: 11491 - DNA, 858 bp, synthetic construct
  misc_feature 1..858: note = Description of Artificial Sequence: Synthetic polynucleotide
  source 1..858: mol_type = other DNA
cgttcgatttaggtttcgagtttttttttcgattttttttagtttaaaggttgtattcgttttaggtttttttagttcggttttttagtttttttttcggttttttttagtttggggttcgggtttttttttcggttgagtagtcgggttcgcgattttttttatttttttcggttcgggttttcggttttttttagaggtgaggtaggggttatttagaatttcgcggttttttattttttttaagattattttcgttttagttttttgttttttattttgtttttttaatttgggttttcgattattgtttcgattttattttgtcgttagggattattagtcgtttttttcgcgtttaggggacgcgtagcggtagtttttgttgatggtaagggtttgcgtattcggaaattttagggtttggggcgtggtgcggtttttgcggttagcgggtttcgtttgagttttagggttttttcgttgttggattacgttttttataggttttagggtcgcggatgaatttcgatttttgttttttttttcggtgttgtggttattgagttaagtttggcgagtcgaggtgattcgggtcgggttgcgggaggagttcgcggtgaggtggtttcgcgttgtcgggcgaggtcggtttacgtggagtcgggagtttgaggtttttgtacgcgggagttgcggacgatggtggttagtgttattgtttacgacgttattgtggtgtgtgtgtgtgagagacggagattttagtgtgtgtcgtgggtgttgtttgatcggatttaggacggtgagtaggggcggggtttatcgtgtgattttggtttacggtgacgtgatcgt

SEQ ID NO: 11492 - DNA, 598 bp, synthetic construct
  misc_feature 1..598: note = Description of Artificial Sequence: Synthetic polynucleotide
  source 1..598: mol_type = other DNA
cggagatacggttatacgagtaattttagcgacgtttttttcgcgcgtgttcgtttcggtatttcggatatttttattttgatagaggtgtagtttagggtttaagatttggttttcgggttttaagtttaatttcgggttcgttagtttagtaggtgcggagttaagtttttttatagacgcggttttttttttacgcgaggtttttaaatttcgtaaattaacggaaatgaagttacgtttcgggagcggtgtttttgggaaatgtagtttagcgtttcggacgtcgtgtttttgggaaatgtagtttagcgtttggttagtcggttagaacgttaggaggttcgggtcgtttatttttcgaggggttcgtgggttcggtttgtggaatttgtttgtttcgtttgtagcgtttcggaggtttttgggagtgttcgttcgttcgcgtttagtgcgtaggcgttagacgtttagggtttgcgagagcgagttgagtggttttagggtttatttttggtaggagagagggtgggattcgtcggttaggtaggtgcgggggaggagttggggtcggtgcggggattcgtcggaatttcgg

SEQ ID NO: 11493 - DNA, 1281 bp, synthetic construct
  misc_feature 1..1281: note = Description of Artificial Sequence: Synthetic polynucleotide
  source 1..1281: mol_type = other DNA
cgcggtgtcggcgcgttagtagttcgcggttaaggttatttgtttttagggtttcggtatttttgcggggaggcggtaggtagaggacgcgcgcgtagtcgcgtaggagtttttaggcgagtgggggaagtatcgtaagagacgcggatttggagcgcggttattgcgttatcgtagcgatttgggttatttaagtcggcgggattgagaggtcgttgcgcgtgggtaggggtttagattgcgttcgcggtgtttgtttcggtttttatttcggaacgattgtagttttgcggggttcgtcgtttatatcgcgttgaggacgttgtttaagttaggcgttcgttttcgttcgcggttttagtcgttcgtagcgcgtcgtttttagacgcgcgtggttgttggcgagggttgagatcgcgttttcgtcggttagtttttagtagtagcgtattttttttgtttcgcgttttcgtttcggattcgcgtcgtcgtagtttcgcggtgatgagtttcgagtcggtttcgtcgtcgtcgtcgttttagtgttttggttgcgatcgcgcggagtcgatcgtttagcgtttagaggagggcgacgaggtttttcgcgcgggcgattacgagatggtagtcgagttttttcgttttatgttagtcgggttggcgtagtcggatcgcggtttgtgtttgaggttgggggacgcgttggttcgcgtcggtcgttttttcgaagttttgggcgcgtttcgcggcgtcgcgcggttcggggcgttgcggtcggaggagttggaagagttggcgggcggtttggtgcgcgtcgtgggtttgcgcgatcggtcgttgttcgcggagaattcgggcggcgagttcgaggcgttcggcgagggagggtcggtttcggagtttcgcgcgtttcgcgatttgttcggttgttcgcgttgtcggcggttgttgtataagtcggtgacgttgttttgcgggtttatagtttgtaagcgttgcgtggagttagggttcgcgcggtcgtaggtgcggcgcgtgaacgtggtgttgagcggtttgttggagaagtgtttttcggtcgagtgtcggttgcgtaggttggtaggttaggcgcggagtttgtagcgttagtagtagtcggaggtcgcgttgtttaggtgcgattaggttttggagttgggtgagtcggttgcggggcgggttcgttttttttatatttgttcggtttagtagcggggtggggagttggtcggtgggttcgaggttttgggttttcga

SEQ ID NO: 11494 - DNA, 1788 bp, synthetic construct
  misc_feature 1..1788: note = Description of Artificial Sequence: Synthetic polynucleotide
  source 1..1788: mol_type = other DNA
cgatgtagttcggagagagtatcgttcgcgtagcgacgcgtatagatttttttttggagacgcgtttttcggcgcgtgcggtcgagttcgcgtgaaatgtatagatttttcggtgaggttttgtttacgtgtgattttgagtattgcgaagttttttttttttattttcgcgtggttatttaaagttttgtttatatttcgtacgtgtagatgttaattttatagaaatatatgatgtaaggatagaaatgggaacgattggaggttgattttttcgtgattacgtttcgttaacgcggtgcgtttatgtatacggcgagtaaacgtatatagtcggtaaatagttatttttattatgtttagtttatagttacgcgtggggagaaggtagcggagagggcggcggtggtaggagaagtgggaagtcgcgcgttcgcgtgggttgttttttgatagttcggcgttgttttttttttttttcgggaacggcgtttattcgggggtcgtaggtttacgcgtcgggcgcgttcgggggggtttcgtagcgtcgagaacgggataatgaggacgcggtgataggttgggtttttgtcgcggtagtggcggcggcggtagttggagttgttcgtgtagtttttgtcgcggttatttttattttcgttttttcggtttttatttacgtttcgagggtttttttgaattcgaagatttttttgatgtttttagtttgttttttttaggaggagttgttttcgtcgttttttcgggttatggtcgacgagcgcggcgcggaggagcggtcgggggcgcgttggggagggggcgtcgggggcgcggcgcgggcgtagaggcggcggggatgtcgggcggttcgggttgcggcgtagtttttttttttgtagttttttttttcgttttcgtcgtcgtcgtcgcggtcgcggtttttttttggtttttatttttgttgttttcgggtatagattttttgtcgtcgtcgcgcgtcggtttttttgtcgtcgtttgttagttttattttttgttatttttttgtttttttttcgttttttttttgtcgttcgtcgcgtttttttttatttcgcgttttttttttttttttttttttttttttttttcgcgggtttttcgtttttttcgtgcgtttcggtcgtttttcgtttttagcgcgtcgttttcggggatgtttcgttttttttttaagagcgtcgggttacggtcgtcgtgttttttggagtttcggcgagggcgggtacgggttttcggtaggtgcggggcgtacgcgggagagttttagttttttcgggagttggaaacggagtttagtttgggggcgtcggggttttttcgttttcggcgggagggggcgtttttgcgtggttcggaagcgtcgggcgggcgggggtgcgcggcggtcggatgcggggcgtcgagggcggggcgttttttcgcgttgtggtttgtggttcgggggattcgaggggtaaggcgtggggtggggggggtgggggtcggttgttatggcgacgggcggcggcggcggttgggatggaggcggaggcgggcgggagtttattcgtattgtattaaatcggttttacgttagtttcgggatagattcgcgaggagtaagtcggggagtttttgggcgggtacgcgtaggacgcgttagtagttgtttcgtggtttttttgcgagtaaaattttcgggggtgtttggtagtcgcgcgggcgttttggtgttgggttggagcggtcggcgggtttggtcgg

SEQ ID NO: 11495 - DNA, 626 bp, synthetic construct
  misc_feature 1..626: note = Description of Artificial Sequence: Synthetic polynucleotide
  source 1..626: mol_type = other DNA
cgtgaggattttttcggtatcgtttcgcgcgggtttttgtttcgtgtttaggcggaggcggggtggttattgtttttttttttcgtttcgcgttttcggcggttttttcgcggttttttgcgtcgcgttttttttaggaggcgttttgatttcgtatttcggttttttatttttcgatcgttagttttagggtcgtcgcggcgacgcgcgattttttttttttgaggggcgcgggtttcggacgcgtcgggttttgttaggtatttagtggagggtcggaggtcggcgattagttcgagtttagtcgtttcgggagttggcgcgagtgtcgttacgattttttttgttttttgcgttcgcgttgttcggtcgtcgggcggtcgttttagtttttttatatagttttttaaaaatagttcgtttcgtatcgttttgtaaggtagtagggagattcgtagcgtgttaattcgcgttcgtcgttagggttaagtttcgttttaggttttgtttcgggttttttattggtttttagtgattttatgagttttttgtttattttatatggttatacgcggtttaatggacgtttttttcgagattttacggttgcgcggagaatcgaacgg

SEQ ID NO: 11496 - DNA, 1037 bp, synthetic construct
  misc_feature 1..1037: note = Description of Artificial Sequence: Synthetic polynucleotide
  source 1..1037: mol_type = other DNA
cgggtttgattttcgcgtttcgttagtaatagttttttttgatttggtttaaggtttcggttttgtcgtttttaaaatcgttcgtaaggtttagtcgttcgtcgggttttttcgttgttttttaagttttttttaattatttgttttagatcgcgttatttgtaatttgtttcgggttggcgttatattcggcgtttcggcgttttttataagtgttttcgtttatgattagcgtttgtaggggtagttcggagttcgggtggggatagtagcgtagtttttggtcgtagcgcggggtgtagacgtcgtacgtttcgttttttagtcgggcgtatatcgagtagtagtcgtagttcggttttcggacgagtttcgcgtatggtatgcgggcgttttcggttattgcggttatcgcggcgggcggcgtaatcggcgggggttcgtaggcggttaggcgttcgggtgtgtagggcgggtagcggaatagtattttcgcgcgcgtttcgtcgtcgtcgttattcgcgtttagtagtagtagtagtagcggtagtagcggcggcggcggtagcggtagcgcggggtagtttattttcggtagtatgttggcggtcggtagcgcggcgtggcgggcgagcgagcgagcgggcgggcgggtaggtggtacggttttgcgagcgcgggagtcgtttttttcgttttttttttttttttcgtcgtcgtagtcgggttttaaagggtcggttttttttcgttttttgttttttttttttttttttttggagattatttttttttttttcgatattttttcgcgtcggtaagtgagtgcgcgtacgttcgttcgtttattttcgcgttggttgcgggttttgggggttttttgtttttttcgggtttcgttttttcgtatttttttggtttgattatgatttttgaaggagaatacggataattcgcgggtttgggtaggatcggcgtggcggtggagaagagcgcgtgtttttgtttgtttttagtttagttcgcgaggatttcgt

SEQ ID NO: 11497 - DNA, 977 bp, synthetic construct
  misc_feature 1..977: note = Description of Artificial Sequence: Synthetic polynucleotide
  source 1..977: mol_type = other DNA
cggttttggcgttaattcgtcggtttttggttttttggttttgttatttttggcggggttgtgggtcggtttaagattataagagggtttcggcgggaattttcggtggtgttcgagggatttaggtaggtcggcgatttttttttaatatattttttgaagttatcgagacgttttgtatttgtcgcgtttttagagtttgtcgtttttaggttttagttttgaggttgcggtgatatttattgggtatttcgggttttgtacgtttcgtaggtcggtcgtaggtagtcggttttgttgttatttttttttttcggtcgttggttggtttttttgttttggaggtatagagggatcgggcgttgaaaggtgtagttttgtttgtggagggatggatattcggagttgaagatagtataggagagaggggatttttatttattagtgaaggcgtcgttagggcgtttgtttttatgttttttttagatttgtgatatcgtcgtgcggtttagattttcgggggcggttgtatgttagggagggagtattttagggttttttgtttttaagggagagggatagtattttttcgggtttttagtttttttgggtgtggcgggagagttttgggcgaggttgcgtttatatttgtatttcggtcggttttttcggttgatttcgttttggttgatttcgcgtatattttttttttagcgttgtaaggatcgtttgaattcgttggttatttcggtgatgaattagtggttcggtgtgaagttgcgggtgatcgagggttgggacgaggacggttattatttagaggagtttttgtattatgagggtcgcgcggtggatattattatattagatcgcgatcgtaataagtatggattgttggcgcgtttggtagtggaggtcggttttgattgggtgtattacgagttaaaggtttacgtgtattgtttcgttaagttcgg

SEQ ID NO: 11498 - DNA, 6206 bp, synthetic construct
  misc_feature 1..6206: note = Description of Artificial Sequence: Synthetic polynucleotide
  source 1..6206: mol_type = other DNA
cgttacgttatatcgagagaagcggagacgatatttttattcggtgggggcgggggcgaggtttttttagcgcggattcgggttcggggagtgtagggcgtattttttttgtgggtttttaagcgaaggtatagttcgggggtcggggtggagggcgcgttttagtaggtcgggcgtacgggtatttgtaggaggattatttgtttgttttcggatgggtggtatttgttgatgtgtcgcgtaaggtcgggcgagttgtagaaggtggtcgggtagtatttgtaggggaatatttgggcggcgtgtagtaggcgtaggtggcgtttttgagcgtttttgttggcgaacgatttttcgtatattgggtataggtggtattcggcggacgtatttaggtttagtacgtcggttttttcgtcgtcgtcggtcgttttttggggcgttttttcgtcgggttcggggtataaggttagtaggttttcggtcgggggcgttagcggcgcgtttttggtttgtagcgtttggtggtgcgttagtaggtgtttgcgtaggtaggtttggcggcggaattttttggcgtagtgatggtattcgtagagttcgttttcggagttcgattcggatacgtcgtcggggttcggcgtgtttcggtcgttgtcgtcgtcgggtgtttttcgcgttttagttttggttgttgtttttggtttcggcgcgcgggcggcggcgggcgcgggtcgcggtttgtgttagcggcggtgcgaggttaggttggtcgggtagttgaagattttggcgtattcgggatagcggtattttatacgtacgatgcgcgagtatttgtgttgcgttagcgcgaacgggtcggcgtatttttttttgtatagttggtagatgaattcgtttagcggtcgcgtcgcgtttttcgcgcggtttcgcggcgtttttatcgggttttttttgattttgagttttagtacgggcgacgtggttatttcgttttcgaagtgtagtttgcggatggttttgggttttttggcgttcggggttttgattgttttggcgggcggtttcgcggcggtagggggcgggggtcgttttttcgggggtcgtagggcggcggtagggggtagtggggggtcggggttcgggtcgcgggtcgtttcggcgttagtcgagaacgtcgtgtttattttgagttcggcgggcgcgaagagtagcgggtcgtcgtcgtaggtgtcgttttcgttagtttcgttcgcgtcgtcgtcgtcgtttttttcgagtagcgcggcgggcgtggggaaggattcggtcgagatcggcgagtttaggttgaagttgcgttcgaagtatttgtgtttttcgtgttcgcggtttacgggtcgcgtgggattgtagagcggcgcggggtgcgtagtttcggggttgtcgaagtgcgcggttcgcgggttttgcgggggtggttgcggtttaggcgcgtaggtaagcgcggcggcgagcgttgtatgggcgcgtttcgcgggcggcggcggcggtagcggttcggggatcgggttcggcgtcgggggttcggcgcgggcgttttcgtagttgggcgagagtagtagtgcgcggtcgtcgttttcgtcgtcgcggattcggtaggaaacgggcgtggattttttgttgcgttttattaggaagtcgcggggtatgttggcgcggttcgagggtacggtattggttcggtttttttttcgcgttcggtttcggcggtttttagtgttttcggtttattgttcgggcgcggcggttgcgggattcgcgtggcgtcggcgacggttcggtttagttttgcgttttgtacgcgcgtttttgttttcgggttcggtagtcgtttttttttaacggggggagggggttattgttttcgtttttcgttttttttggagttaattagcgcgttcgtagttttttagtttggtagggtgggagggcgatggggcggttaaaagggggtcgggattcgggggtcgttcggtaggtgcggtagatgtatttgagggcgcggggttttcgcgcgcgtttttggtcgtttcgttcggcgtcgtcgtttcgttcggtttaggtatacgttcggtttcgtttttttttacggtttgttgtttttttatggggaggcgtacgtgtttgggttttgtgtttttttttcggggggcgcggagtcgttaaatgggttcgtttattagcgcgataatgtacgtttttttttcgcgcggggattattcgcgggtcgttagtaaaatagtaataaaggagaagaatggttttaaatatgttaggagggtttaattcgcgagtcggagtcgagggggaagttgtgcgcgttgattgggtgggggcgggggcgcgtcggggcggtgcgggggagatcgttgcggaggcgtagtggtttcgcgtggtgtttgggaaataaataagaattcgagagagtagtagggttcggacggttttcgttcggattttggacggatgggtcgttggatttaagaggttaagtaaaagggtttttcggggttttaagtgtggatagggggttcggttttttggtagtggtcgagggcgatgtttgtgttcgtagttttcgcgcgtttacggggttagagaaggtttttttcgagtttgagaaggaattggtacggtttttttagtttttcgaaagcgcgggattggagcgcgggcgggttgggttgggtttttagaggaacgtgaatttttgaatttttgggtttttggaggtttgggaatggtatttttggcggggttcgatttaggtcgttcggagttttcgcgtggtttaaggttcggttaattcgggtcgagttggtcgaagttcgaaacgcgcggtcggtttcgtgcgttttagtgaagttggttttttttttttcgcgcggttttatgtatttttatttcgagcgggtattttgtttgtcggttgatattagatgttaaattaagggttttaattaaggcgttgcgaaataaaggggttgtttgtttgggcgtagtttttacggagtcgtgttttttttatttttgtgaaggaaattaattttttgttattgagtttcggtcgcggttaatttggacgtaaaagagacgcgtgttggacggggggagggggggtaatttgtattttgaggtaggttgaggttttcgagaggataagtcgttttttttgtgttattaggaagagataatagcgaagatttttttcgtttttatttttatttttatttttgttgtcgtttcgtttggatttagattgggtcgtttgtttttattttttgtttagtttagtttcgaggaaatataaaaggtagaattttcgggggatagggtagagaattttacgagtgcgtagtggttttgatcgtttaatattggggaataaatagttaagttatataaaatgttatatgttgtgaggaaaatgttattttattgaaagagaaggaaatatttttttgtaaagttttgtatattagatagattttgttgagttttatttacgtttaattttattgaaggtatttaattgttttggattttttttttgaaaatattttggcgtagaaattaaatatgtaaaaatagagtttatatgagttataagttgtgatggggatagttgttaggtttaattaattaaggggttaattaggttggttaattaagggaaagatatttgataattttatgtttgtaatattttaatttatatattgaaaagggaagaatgtatatagtgaaatatattttgaaaagttttattttagttttaaaaatgttgtggtgagtgttagtttttttaaaagttagaaattttaaaatgagtttatttaaaatttataaatatatttttatttaaaagtaattgatgttatttttttgtttttttgagttttgattaatagtgttgatgaaattagaagtgggaaaaggatttcgagatagttttggttaattttattttttaattacgaattttatttggattgtagaatagtatagggcgggggttcggtttgttttattcggttttgtatatgtaatattttttttatttaatagataatagagagttagttattttgtgaattttttaaaaataataatatttataattgtaaataagtcgtggggatgggaaatcggtatttttattaataaaaaaaataaaataatttttgcgtgagtgaatttaaatagggttttgaatttagttaagggaatttattaaacgttattgagatattgagatttaatgaattcgtttttttttttttatttgtggtttttagttttgttagcgtaaatgaaatttgtttttagacgggtatagttaaaataaatggaaatttgaaaggtattagtattggaaattaattttattattcggggttggaaggagttaggttgcgtacgcgcgtacgtatatattagcgatttttaagtaggtgtagtttagttcgggtcgtggatcgtagtcgttttttgcgtgatttttttagaatttgtgtattcgtatgtatggggatatcgggtcgagatatttgttttcgtttgggaagagtaaagcgttattatagtgcgttttcgacgtcggttttggcgtacgcgattcggagaatgggtcgcgtgaagttaagttgggggaaatagcgcggatttgtttttttttaggggggtttcgcgaaagttagtgaatataaggatttaaggtagagtatttaaggggtttttttcggttttaggtgatttttttttttttttcggggttttggttagcgttttggaaaaatttcgggtttttttatttttttttgcggatttcgcggtgggtttttttttcgacgattgcggagttcgaggttttaggttttttaattttttttattttggtgtgcggggatgtcgtcggggagcgcgtcggggtttattttgatttttattacggttggaaattaaagttaaggtaatagggagtttgtagaaagcgcgaagtttggaaataagagtagaagcggggaatttttgcggaggagttggttttttggggtgtttaggagaataggaggttttggttttacgggaggagtcgggcgggttcgtatttttatttcgtagagggtatcgcgtttggagacgtcggcgttgggggtgaggtgttagcgttttttattattattttgttgtagattttttttttggttttatagaagtttttattttcggtttttagtttttcgagttataatcggtaggaatcgtgcgttatcgttgtagtgttcgtcgttcggagggattagcgtttttttgcgtcgggtgcgttcgattcgagtcggtgagaggttttgtatttgtaggaatgaggggttgttgtgttagttttaggggtacgcgagagatacgcgtagttcgtttggtcgttatttcgttcggttcggttttaggtatttttcgggtttttcgttcgcgggtcgttgtttttgttcggcgtattagtataaagttgttagggatttttcgtttagataattttatataaaaggagagtgtatgaaagagagcgaataagggacgattcgcgaggttgcgtcgtgcgttttcgcggggagggatcgcgtttaagtattttttttttttcgagttttaagtgttttttggtaatttgttgcgcgtttattattcggtcgggggtcgacggcgtggttggttattttttttattttttcgagagtatcgtcggggttattgtacgttttttgaagtgtttttagggttgtttgtttttgttttagtgggatcgtcgggttagggagggaggagagcgggtaggaaggttcgggcgggcggcgggaagggcgacgtcggcgaaagttggtagaggcgaagtttagaaggtgagaaagttataattaaagaattaggttagggagagttaggacggtacgggatttatcgggatgatattgattttggggcgtaagaggtgttttttatttgtgaggtgttggcggtcgttagttcgtgcgtttcggttttaaacggaattgataaaatttagcgaaattgattagaaaggttgcggcgatttcgattttttttttttttttttattttatttatatttgtatttcgtttcgtttgtcgtaggaggacga

SEQ ID NO: 11499 - DNA, 574 bp, synthetic construct
  misc_feature 1..574: note = Description of Artificial Sequence: Synthetic polynucleotide
  source 1..574: mol_type = other DNA
cgttagcgttaacgaatgtggggatagttcgtttggcgttcgcggtcgtatttttatcgggtagtttcgtatttttttttcgggtttttaagtcgttcgtttcggttgcgggagatttcggcgaattatattcgagaggggggcgcgtggggcggagttttttttttattgttttttcgttattagtcgtttttgtcgtcgagttcgtagtcgttagcgcgtttcgagtttttttaggttagaggttttcgtaggcgatggcggataagagggcggggattttagaagtcgcggcgcgttcgtcgttcggttttgttcgggagggggacgcgcgtacggttttcgcggttcgggttcgagaagttggggggcgcgggtttttttatttcgtagcgggtttcgggatcgttttttttttttttgggcgcggggaagcggtttttacggcgattatttcgagtttggaaaatggtcgggttcgggacgaagttttagaaatttgtggtgtagaggggttagggattcgggtaggagttagcgagaaggtcgaggacgcgaataaggaggagggcgt

SEQ ID NO: 11500 - DNA, 3438 bp, synthetic construct
  misc_feature 1..3438: note = Description of Artificial Sequence: Synthetic polynucleotide
  source 1..3438: mol_type = other DNA
cgtgtttgtttcgttttggtcgtttgaggtcggagttatatatagtttgtatagattcgagatattcggtttcgagtgatttggaaacgagtgtgtttttattgcgtttaaataagacgaggatatttataaggtgcgagtttttaatttttagttattggtaggggttgcgtagcggtatcgtttaggttttttttttaggcggtcgatttatttttgcggagagtacgtttttcgaagagggttgtagacgcgtttttttagtatttaatttgttattttataagattgagttaagttttagttaaaatatatttattttattaaaaataggcggtttaatattacgtcgtattttagttttttcgagggcgtaagagaatagagagtttttagattaattggaggtaaatattttattttttaatatttaaaaataatttaggcgcgtttgtatcggtgtggtttacgcgatttttacgcgcgaggttagtcgggttggtttagcgtagatagcggtcgggatttatttatttagtgcgcgttttttttgtttttcgttgcgcgcgtttaaagttagaaagaagaaggtgacgcgggaggcgggtcgggttttcgggtttagcgaattcgcgatttattcggtttcggcgtttgagtcgaggttttagaaagaattcgttaattttagttattttggatttgggtagggagggtgcgcggtttttaagtttagtttggatgtttagtgcggtgtgtttcggttttttcgtttgtttttcggggaggttttttattcggtggttttgggtcgttttattgtggcgtttttatttttggttatcggttttttttcgtttaggatttttcggtttagggagtagtcgacgggtattttcgaacgttggggtacggaattttaacggggcgattagagcggagttcgcggttcgaggttcgcggttgagtacgaagacgggattcgaggatttgtatatcgttcgaggggaatttgttttgggttttggtgtatatatagtatgcgttttgggttggtttgggttgggttaggtaggggagatttggttgggtacgaggcgtcgtttaagtttttcggtcgtgggtcgggcggtcgcggcgtttttgcgtatagtggttatttggggtcgtattttatgtttgtttgagttttttcgcggcgggttgacgtcgggatttgtttaatcgttataaaacgtttaaataaaaatagggtcggttttttagtagtggagagttattcggagtatcgtttcgggtcggtttcggtttcgaggtttcgggggtttaggatttcgtgcgtgtggcggggaagaggaatttagagtttttgggttgttgtttttttcgtcgtttttattgtgaatattgtgcggtggggtgaacgcggggagcggcggggttagtggagtcgaattttagggttttgcgattgtattcgttaggaggggttttcgtttggtttgagaaaggttttttgaggttaagagttgggtttgaatataattttcggagtttcgagttcgttttttttaatatataaatacgcgtagatttttagaaataggaacgtacgatatatacggttagaagtcgcgaggatatatagagcgtcgtttattgggcgggggtcgtttgggaataaagggtttaggaggcgttgtttcggcgtttattttgagtttttttgggggtgatacgggatgggggtggggtgtaaagggaattgagggaggagagtgcgcgaggaggggaaagcggtgatttggtttagaggtggggcgcgtattttaggcgagcgtgcgtgggtcgggatttgtagggtacgggggtgggtttaggttggtcgttttatttcgttttagcgtttcgttaggttttcgtcgtttcggggtcgttcgggtcgttagttagttgacgcggggggcgggggagttgttaggcgcgtttcgttttgcgtcgttgggtcgcggaggtcgtgtagttattggttcgcgtatcgggtcgttcgggttttcgtattttagtgatattaggaggcgataaaaggttgcggcgtcgtcggatttagtatagttgtatcgtcgagttgcgagcggttgcgagcgagagagcgtaagagtaagagagttagagagcgagtaacgggtattcgttttacgtttttttttagttttatcgcgcgtttcgtttgtttttttatttcgttcgattttattcggttcggtttttgcgcgggtatagtttagagttttggggcggtgtaggtagtttcgggatttttcggcgcgtcgtcgcgtttttagataaaggtttggtcggcggtttcggttcgttgcgttttcgtttttcgtttttttagttttttttcgtttttttttttcgcgtttggttcggcgcgtttcggtcggtcgtaaagtttttcgggcggtagcggcggttgcgtttcgttttagcgatggtcgcggagttgagtatggggttagagttgtttattagttcgttggttatggagtatgttaacgatttcgatttgtttaagttcgacgtgaagaaggagttattggggcgcgcggagcgttcgggtaggttttgtatacgtttgtagttagtcggttcggtgttttttatatcgtttagtatttcgtgtagtttcgtgttttcgtcgtttagttttagttcgatcgaatagaagatatatttcgaggatttgtattggatggcgagtaattattagtagatgaatttcgaggcgtttaatttgacgttcgaggacgcggtggaagcgtttatcggttcgtatttagtgttatagtcgttgtaaagtttcgatagttttcgcggcgtttattattattattattattattatttttattcgtattatgcgtattcgggcgtcggcgtggtttacgacgagttgggttcgtacgtttattcgtattattattattattattaagcgtcgtcgtcgtcgtttagcgtcgttagttcggcgtaatagttgtttattagttatttcgggttcgggtcgtacgcgacggtttcggcgacggcggcgggcggtaacggtagcgtggaggatcgttttttcgacgattagttcgtgtttatgttcgtgcgcgagttgaatcgttatttgcggggttttattaaggacgaggtgattcgtttgaagtagaagcggcggattttgaagaatcggggttacgtttagttttgtaggtataaacgcgtttagtagaagtattatttggagaatgagaagacgtagtttatttagtaggtggagtagtttaagtaggaggtgtttcggttggttcgcgagagagacgtttataaggttaagtgcgagaaattcgttaatttcggttttagggaggcgggttttattagcga

SEQ ID NO: 11501 - DNA, 4088 bp, synthetic construct
  misc_feature 1..4088: note = Description of Artificial Sequence: Synthetic polynucleotide
  source 1..4088: mol_type = other DNA
cggttcggtttggttcgggatacgtttgtttcgcgtatatatagttagtcggttttgttcgaaacgtattaagtcgcgtttagcggtaatcgttttttttttttttttcgtcgtttttttttcgatttcggcgttacgatttttttgcgtttttttttttttattgtattatttttatcgtttcgatttttttcgaggggttgatgttattagtttttttatttttttcggttattttttttcgttaaagtttttttttggcgaggtttttttcgttattacggcgttttttagcgttattttttttttttttcgttttttttttttttttttttttttttttaataaattttatattttacggaggcgggtttttttttttttattcgttattcggttttttgttttcgaaattttttttttgtcgtagttttcggagttttatgggttttttttttttttttttaatacgtatttaaatttttggcgtcgtgtaggtttcgcggaaaaagagagaaagagagaaagagggggagagcgagagcgagagtaagagagagatattgagcgggtaggtcgggggagggggattcgcgttcgcgtcgttacggtttttcgtttcgtttttgagttttcgttcggtcgaattcgcgtttttgggtttttttttcggtttcgttttttatagatagagttcgcgaacgggcggggggttcgggagcgcgcgttcggggcggggggcgggttcggcgcgcgcggtttgcggggcgtttttcgagggttttcgggtcggggtcggcgtttttcgttcgtttttatttagtagtagtaggcggtgcgtggttcggtagatttgtttgtttttttgtagttgtttttcgatttttttgttggttttacgttgcgtttttttttcgttgcgttggttttcggttttattgttttcgaggtagtttatggcggcggcggcggcggcggggcgcggtcgggttgcggcggcggcgggcgcgggcggttttacgtgggtcgggagggtcggggtagcgtcgggcgggcgggtcgggcgcgggttcggtttttcggtaaggagcgcgcggggcggattgcgggtcgcgggtcgcggggcgcgcggacgggcgggaaggggagggtgtcggtcggatcgaggggcgcgcgtagtttttcgtttttcgagtcgaggtcgagggggttgatggtcgtcgtcgggtcgaggcggattagagtaggagttgcgggagttgttgtcgtcgttgtcgtcgtcgtcgtttttattgtttcggtcgggttttcgtcgtcgtttcgagttaaaagcgtcgcggcgggcggggggaggcggggggaggaggaggcggcggcggcgaggggggtggaaggaggaggaggaggaggagggtcgaggagcggtcgcggcggcggcggcggttgggagggcgggagtcggcggagggaggcggtttttcgggagttcggggagggggttttttcgttcgcgttcggtcggggacgggacgggtcggggagacgttttttatttttcgggttcgggtagtagttcggttgagtcgaggggggagagggggcgttttcgcgttagtgacgatttttcgtacgacgttaacgttttatttttcggatcgcgtcgttcggcgttttcgaggttttttttttttttcgcgggcgtcgtcgaggggttggggtgggcggaaggggagggagcgcgcgttcggatttaggaaaattttcgaaagagcgagagatatagagagttagagagtaggagtgtggaaaaagcgaggcgagtacgaattaaaggatagagtaatcgaaaaggaaaatgtgtttatatatatatacgaatacgaataaaaatttatattatatagcgatggtggtgtttggtggcggtggcggggtggggggtttgattagatgagtcgtttttcgcgttttcggcgtcgggcgttatggttcgagtcgaaggcgtttttggtttcggagcgttcgcggtttttgcgtttggcgcggtcgtttaagtaggagaagaaggcgtagtttaggaatattcggaagtagtaggtcgtttcgaatacgaagtcgtagtcgcggttttgtttcgtgcgtttttgtagtaggaagttgagtatttacgaggggttgcgtatcgagaagattaggaatattacgaggggtaggtgggcgtttagcgcgttagttttgagcggttcgggtcgttatacgatgtttttaacgcgcggcgtcgcgtagtaggcgtcgttttcgtcgttcgagttcgtgttttagttagtttaggttttattcgtgttttcggcggcggcgtttttttcggcgttttcgacggcgtttttttcggcgtttttgtcgtcgtcggcggcggtcgcggcggcggcggtttcggggtatcgggtttttttttgggtttttggtattttttttttttttttttttagtattttttttattttttttttttttttttttttttttttttttttttttcgtttttgttttagtagttttttttcgagttttttgcgttttttgtttgttaggaatttttcggggagcgtttttcgcgtcgggtttttggggtttttcgcgagtttttcggggttttcgttttttcgcggcgcgagcggttttttcggttcggttaacgtcgtagtcgtcgtcgtagtttcggtagttatttcggtagtcgtcgcggtcgtttttttttcgtttttcgtcgttcgggttttgagttttatggttatttttagtatggtggttcggttatttcggggagttcggttcgcgtttggttcgggttttttgtttgttttcggtttcgggttgttcggttttcgtgcgtttcgtgtcggggggtttggttgcggttttcgtcgcgttgtttcggggtcgcggagcgcggttgttcgggtttcgggttgttgggttggttgtttaagagttagcgttaaaaaggatgagtaaacgaaaaagggataagaataaattaaaaagtatttaataatagcgagaaattaaaaagtattaagaaatgttaatttaaaaagaaaagtgtaaaggcgcggatggtaggagtttgtttatttttaggcgttttttggtttggtttttgggtacgttaatggagaagagaaaagagagagaattggggggtgttcggaggcgtttcggggtaaggtagcggcgttcgggcgtttttgttttgtttcggattcggcggtttttgtttgcgtcgggcgattcgtattttcgcgggaggtttcggcgtttttcgatttatatgtgagtgaggtgtatttatacgtaaggtagcgtttgtcggtcgttcgtcgtcgtttcgcgtcgggataggggttcgttttagtcgtcgcgtcgtagttcggagttagagagtaggggagcgtcgcgtcggttagttatttgacgtagttcgtttcgcggtgtcgacgcgattgagtgttttcgtcggggagtagagtttttaatcggtttcgatgacgttttagtttttttagaggatcgatttatagtagcggtttttataaatcgaaggggaagcgcgaaaaatcggtttatcggggacgtatttaaatgggtcgtcgcgtattttgggggtgtaggtcggtgtcgggatcgcgcgggcgtgggtcgggggcgcgggggtcgcgatggcggggggcgcgggcgcgtttaaggcggtgggcgtttaatttcgttttttagatttgttttttaattttcggtgagtggtgtagttttgggcggcgtgtaaagtgtgcgacggcggcgtttatttttgttgtgcgtttttttatttttagttatttatttcgtttttttagcggcgcgcgttcgtcgaggtaggtgttagagagtcgaattcgaattatttgcgacgttcggacggagtttcgtattttcggacgagaaaagtgcgatgggagtgtaaagttttttttgttcgaagtagtaggcgcgtcggtgttacgggagtcgaggagcggtggtcgtggttgtggagtcggtgttcgaggcgt

SEQ ID NO: 11502 - DNA, 522 bp, synthetic construct
  misc_feature 1..522: note = Description of Artificial Sequence: Synthetic polynucleotide
  source 1..522: mol_type = other DNA
cgatatagttttcggcgcgtcgggtattgaggttttggagtatagcgtggggggtttggtatagatacgatttacgatcgggtcgattttcggttagaaagaattatgtttcggtcgttcgggtcgcgggttcgcggtgtatttttgtaggtttttattttgtttcggtagaggtttgtaagaattttgtgggtgtttttcggagcgggtagaggaggagtttagcgtcgaggtttaggcgcgtttcgttttcgttttttttcgtgtttttttttcgttgttttttttttaaaggtcgagatttggacgttgttcggtggtttcggcgggggttttgtttttggtcgttgtttttttgaattttaggtgagaagaataaaacgttttgacgttgttcggttttcggtttttggagaggacgggtcgtttttgtcgagagaattgtgcggaattaggaagcgttggtgttttttcgtttttacgggattaagcgaaattcggttttaaacgaagtaaagtcgg

SEQ ID NO: 11503 - DNA, 2260 bp, synthetic construct
  misc_feature 1..2260: note = Description of Artificial Sequence: Synthetic polynucleotide
  source 1..2260: mol_type = other DNA
cggtattcgggtcgaagcgtttggttcgcgttttcgcgcgggtttttttggaatcgtttcgggatacgcggttttttcgttgttggattttttttcgagttttagtttgttaggtagggattttttgggcgggcggcggggaagcgtcgagtcggcggtcgtttatatttttttttacgtagtataaaggatattcgtcggtaaatttttttcgtttttgattcgggtcgagtcgggaatttagcgttagttttgtttttggcggggttgaggttttttttatattttaggttatttggtaaacgttttgaggttgttattttttttgggtttaaggtttacgggttgaggtttgttttcgcgtggagtttaaggtttacgggttgaggtttgttttcgcgtggagtttaaggtttacgggttgaggtttgttttcgcgtggagtttaaggtttacgggttgaggtttgttttcgcgtggagtttaaggtttacgggttgaggtttgttttcgcgtggagtttaaggtttacgggttgaggtttgttttcgcgtggatcgtcgagagttcggtagattttttttaaggttttgattttaatatttttagtgttttgttaattatattttttgttttttttttttattaaggttatcgttaagatattttttttttttttttttttcgtcgttcgttattttttttgttttttttttggttttttttttagttttttgggtttttttttcgcgttgttttttagttttagttgtttttttcggtttatatttcggtagttttttttttttttcgttttcgggtattttttttttttggtcggtttttgaaatttagtaggttcggtttcggttattgtttttttttgtttgtttttatttggtttgtttttttaattatcgtttttttatatttttttttttttttttttggtaagggggacggggggaaacggggtattatattttcgtttttcgatttcgttattttttttagtttcgtgagtcgcgttttttcgttttttttaggttcgcgattttattttgaggttttttagatttcgtagggttttttacgttattaagtttgtttcgattttttttcgttgttttttatattttttgtcgcggcgcggtcggttagggatttatttcgaggtttagttggtgggggtgttggggtgcgcgcggattcggtatttacggcggcggcggcggtagtagtagtaggaggaggagaaagacgaggaggaggaggaggattagttgagcggcgttttttttttagttcgtagcgcgtattggttttttggggtattttcgggagagtattaagatcggagattaggcggcgatataggtaatcgttgttgtacggggttgggtttagtcggtttttagaggttagggtagggggaggtaggattgggaaggagggtcggagaagtggggtgtagagggcggggtagcgagcggttaggttcggaggaaggcgttttaggcgtttagggatgtcgtcgttcgggttgacgtcgtcggttttttttttcgttaggcgggcgtttgtagtcgcgggcgtacgggtttcgtttcgtttatcggttcgttgtcggcgttcgcggtgcgtttcgttttgtgtttttcgtagtcggcgtgtatttggtgtaagtaaaggcggttagttgatgggtcgcgcgcggattggttgtttcgtcgtttttttttttttcgttcgatttttttcgcggtttttcgttttcgttttcggcgcggtttcgtgttgggtattatttgtggatcgtttaataaaggcgtagcgcggcggggttcgggtggtcgggtcgcggtcgtcgttttttgtttaggggacggtaggttgcggttgggtagggaggcgaagcgtattgtcggtttttagtaaaagatagattaaaagaaaatatacgttcgtgttaggaggttagttaggtataatggggttttatttttttgcggcgtagaattcgggttcgggggttgagaattagatatagttcggtttggggttgtgggagttaagtttcggggtgaaattcgattttgcgttttaaaatatagggcgcgttttcgggttgtgtgtgcgcgttcgggggcgtttttcgtagatttggttcgggtcggtgtttttgtcgcgggaaggaggattcggacgtttaatttagcggcgaagtcgttttttattggaggaggtttttcgaaaacgt

SEQ ID NO: 11504 - DNA, 1502 bp, synthetic construct
  misc_feature 1..1502: note = Description of Artificial Sequence: Synthetic polynucleotide
  source 1..1502: mol_type = other DNA
cgacggtgagcgtggagtagttcgcggtttcgttgttttttttattttcggatttttagtttttttagagtggaggggtaagtatatagtaagtatttgatattcgttcgatttttgagttttttatttgtaggagttagggggtttgtttttcgtacgttttttgttggagggaggaacgagggaaggagaaaatttacgttgaggtcgttggtcgattattttttttatttttcggataatattgatgggttttattaaggaaagtcgaattttcgtatgttcgaggagtgtcggaggtggttgtgcgtttagttttttttggtaaagggttcgaagtattcgtttatttaaaggcggtcgagagttatattatttgtttgtatgacgggagatatcgaaacgttttttttgaacgcgatgataaatatttttttttatttagtagcgacgtgtacgtgatagtttttgggttttcgtaattacgtggaaatttggaataggtttgcggttgtatatcgttcggacgtcggggtttttgcgtttttcgttttttttgatcgcggttgggtagtcgagtcgtaggtagttgggggttttcgaacgtcgtttttgtatcgcgtcgtttttgtttcgggtttcggtagttttcgggttttcgtattgttcgtcgcgttttgtttatagggaagcgtttttttaggcggcggcggttttggtgcggatttttcggtcgtagttatgtgggattcgcgggtagttaggtgcgtagcggcgcgggaagtattggggtatttttggtttttcgggttcgttattttttttggcgggaggcggtcgcgcgcggggattggcgattttgaggtagcggtcgaacgggttcgttcggttatttttgtggggtttatagttatttaggtgtagattcgagttagttgcgcggggtcggtcgcgggggacggtttcggttttttcggttcggagggattagggtacgcgttgcgataggattgcggcggcgcgcggtttgtttagtttttatttcggtatcgaagtcgtagttttcgggtttattttcgtatttttaggggttttcgggggttgtcgataggtttttgattagcgagcgcgttttcggggtaagtatttttggcgggtagaaatttgggagcggagtatagcggtgtaagggaatcgtgttaggcgggaagggcggaatttgcggggaatttggagcgcgttggttttttttcggtagtaggaggtttttttttttgttcgttcgattgagggttgttgggttggtttaaattggattgtacggtttattagtttgggtttatcgagtttagggggaaggtagtagtagggatttaaggttgggaagcggagtttttagaagtttttgtttttgtttcggagcgttttcgaatcggagttcggagtttgttgtttgggaggcgcgttgcgtttttttttaattttttgttttcgtttcgcgg

SEQ ID NO: 11505 - DNA, 510 bp, synthetic construct
  misc_feature 1..510: note = Description of Artificial Sequence: Synthetic polynucleotide
  source 1..510: mol_type = other DNA
cgttttttgtcgggagttattcgttagtttttttttttagttcggttgcgtagcgtttttaatttaatttttggatttattttcgttttagtttttttcgtgtttagcgttttttgtaaatgattttttcggtcgggtgtttcgttttttttttcggtttttttcgcgtggtttgtttttcgttcgtttgcgttcgttcggtttttttgtttttgcgtttttatttgatcgtaaaggcggttagggtagttttcgcgcggtttgatagttacggtttttagtttgtttttggacgtgggaaattcgggtttatagcgtttttacgtatattgcggtatagattggcgttttttacggcgtttttattggaaagcgtttttgtggttttggggagagggcggttttattcgttatttttttcggagttgttttcgtttatttttatgggaggaaatcgtagggcgtgtgagttttcgatttttcgtttttattttttttaggatcggtcgt

SEQ ID NO: 11506 - DNA, 940 bp, synthetic construct
  misc_feature 1..940: note = Description of Artificial Sequence: Synthetic polynucleotide
  source 1..940: mol_type = other DNA
cgggtaattgttcgggttttgtttatttttttcgcgggtcgtatttgttaaggtcgtatcgttagcgttttttgtcgttttttttgtatagagattcgcgtttattttcgtattcgtattcgtattcgtatttgtttttatttcgcgttcgttttgcgtcgaggtcgcgtagtttgcgggtagtggcgggggtacgaggatgcgaatttaggcggggtcgggagttgggcgcgttttttagaattttcgttacggttaggtttgagttttatttatttacgtcgtattttttttttttcgtgggggtttatatggtcgtgtcgggcgcggtttcgcgggcgcggcgatcgggcgataacgcggcggggacggtcgcgggttcggttgtggcgtatcgcgagtcgaggcggggacggttaggcggcgcggggtagtgggcggcgtattttttataggtcgttcgggatgtcgtcgttattttcgttacgtttggatcgcgaggtttcgcgggtggtttagtagtttttggcggcgcgggcgaaggttcgttatttgttcgtcgtcgttgttttcgtgtcgtcgtttgtttttttatagtttcgtcgttcggttttcggcgtcgtcgcggttcggttcgttttagcgggttcgtaggacgttcgcgtatgcgttattttttgtcgcgtaggggttcgcgttgttcgggttcgcgtcgtttcgagttcgcgcgcgaatttacgcgtcgttgttgcgcgttagcggagggaaattcgcgagaagttattggattgttcggtttcggatcggtttttagaatcgttggttcggggtttttagttgtagtaaatttcggagggggcgaagtcggttaggtgggcgattttttttattcggattttttattcgttttcgtttttagtgttttttgtttgcgtttcga

SEQ ID NO: 11507 - DNA, 2718 bp, synthetic construct
  misc_feature 1..2718: note = Description of Artificial Sequence: Synthetic polynucleotide
  source 1..2718: mol_type = other DNA
cgttcgggtcgttttttttgtttagtttcgagcgcggagttgtttaggatttttagacgggtgcgagttattgtttgaagttttttttttttcgtcggaagaggatgtgtttaaaggatcgtcggaaattttggttgaagatcgtgtagatgatcgggttgagcgagttgttgtagtagtcgatttagaagaagaatttgaagagcgggtcgggtatttggtaggtttcgcggtagatgtcgtataggttgtagttgaagaagaaggggaattagtagagtacgaatacgtttatgattatagttagtataaaggtgaagcgtttttcgcgcgtttgggttattttgcggcggtatacgttgttgcgcgttcggcgtcggcgcgataggaagaattcgacggagcgcgagttggcgcgcgataggcggttatcgggtttcggggatttggaggcggttagcgttttcgatttagtcgttttcggtttcgttttttgttcgttcgtatcgttcgcgttttttttcgcgttcgttcgtcgtcgttcgttttgtcgtaacgcgtttcggcgtcgtcgtttttcggtcgttgcgttgttttcgttcggttttacgtcggcgggcgggggcgcgtagtgttcgttttcgtttgcgtttgtcgtcgcgtttagttcgttttcggtagtcggggacgtatcgtcggggtttacgggggcgcgtttttcgttgagcgtgcgcgtgcgtagtttggttattcggtagatgcgcgcgtagattaggtttatgatgaggtagggcgcgaagaaggagtcgatgtaggaggataggatgtattaggtttcgtcgttgaggtcgtattgcgggtaggcggcgtcgtcgggttggcggtagagcgagattagcggcgggaaggagatgacggtcgagatgagttatacggttacgatggtggttttgacgcggcgtggtgtgcgttttaggttgtattcgacggtttgcgttatcgattagtagcggtttaggttgatggtatatagatgtacgatcgacgaggtgtaaaatagtatatcgagcgttaggtatacgtcgtattatatttgttcgaagtattagtaggttatgagttcgttggttaacgagaagggtatgattagcgtggttattaggatgtcggtcgaggttagcgatattaggaagaggttttgtggcgcgcgtagcgttcggttggttagtacggcgattattattagtacgttgtttattacggtgaagacgatgaggaagtttattacggtagttagttttgttatcgcgttcgtcgagtattggtcgcgcggcggtttttaggaagttttcgaggtattggtaatttcgtcgttgtttttttcgttcgcgtcgttcgtattggggttcgtcgttgtcgttatcgttagcgtcgtcgttagcgtcggggacgttatggttttttcgcgagttacgtcgttttttttggagtcggggcgtagtcgcggtagttcgggcgttttttagtcggggtcggcgttcgtatcgtcgtttgttgttcgggcgcgttcgtcggggatcgcggcgtttagtagtcggttttcggtcgtggtggtttcgcgggcggcgcgtcggagagcgtggttgtcgggtttttcgtagttgtcgagcgtgtaagtgtagagtaggaggcgttcggagcgagcggcgacgcggttgcggggggaggggggtaggtttcggggttttcgcgcggtttcgttttcggttcggtttacggggagcgtttcggcgtcgagtttacggcgacgcggcgttcgagcgggcgtgtttgagcggtttcgcggtttcggagtttagtcggggcgtaggcgataggcggcggcggttcgggcgtttcgttttttattcggtcggttagggttcggcgcgtcggggcgtcggtcgtcgttttttcgggttttcgcgttcgcgcgtttttttcgtttttaattttattttttcgggcggggcgtcggcgtcgtcgcgagtttttcggttgttttcgggcgcgggcgtttttcgcggtttacgtttggtcgtgcggtcgtcgtttcgttcgtcggagttgcgtcgtcgtcgtcgtcgtcgttttgcgttgggcgcgagtgcggtcgtttgcgatcggtttttaatttgggtcgagttgcgtagcggggcgggcgcgcggggcggggcgggtcgcgggttttggggagttggtcgggaatcggagttcgcggtcgtttggtcgaatttgttcgcgcggcgtcggggaggagttcggggcggcggcgcggggcgcgcgttcggcgagggcgttttttttagggtcgtttgtagtttgcgggacggggtcgagcggcggtcggtttgggtggtgagttttagaagttgttttttttaagattggagtttttttcgtttttttcggcgtaggtatgggcgtaggcgggggcgcgtatacgcgcgcgcgtagtacgggcggttcggggtttatggtttgatggtagagtaatttttcgtagtttgggggaggacgcgacgttatttgcgtgcgtataggttttgtcgagtttagggttcggattagattttggatcggcgtttttcgttagagttattttcgtatttatttcggttttagttttttcggtttattttttagcgttgttggagtatgaattataattaacggcgg

SEQ ID NO: 11508 - DNA, 2661 bp, synthetic construct
  misc_feature 1..2661: note = Description of Artificial Sequence: Synthetic polynucleotide
  source 1..2661: mol_type = other DNA
cgcgggtaaagcgtgtttttcggtgggttataagtagcgttcggtttttttttttttcgttaagttgtttgatttttttttttaggcgcgcgcgtatatattatatttatatattttaaaattaagattcgttttataggatttgggaaaagaaaaagaaaaaaaagtttttaattattatttttttttcgtcgatttttttttatttttcgttttttttttagcgggtagttaaggagagttagaggcgggggaggggagagggaggagaagcgacgtaagtgggtagttttttagcgtcggcgaggcgcgggaggaggagaagtagtggggaggcgtagtcgtttatttgcggggtagggcgcggaggagggattcgggttgcgcgttttcgggtcgaggaattaggacgcgttcggagtttcgtacgcggttaagttcggggcgtttttttttttcggtcgggcgaatttaaggggcgtagttttttgttttgatagagttggtcggcggaggcgtgtagagcggcgagtcggcgagttaggttgagaaattcgagtcgggaataaagaggggtcggattgagtgtgtgtgtcggttcgagtttcgggtagaggtatttgggttcgaggttttcgttgtgatttttcgagatttcgtagtgttttttattgcggagttttcgcgtttgtcggtaaaaattttatttttggtaaatttttttttttttttttttttttttcggtttttattttttgttttttttttttttttagtagattaaatgagtttcgagaagaaaaatcgaagcgaaagggaagaaaataagaagatttaaaacggatatttttagcgtgggtggttttttttttttttttttttttttttattttttaggaagtggacgtttcgttattttttgatttttgtatttttttttggggtaaacggggtttttttgtttagatttttttttttttttcggaaaataaattattaagtcggtattcggggtaattatagtggagagggttttcgcggagacgcgtcgtcggatttttttttgtattttggggaggcgtgttttttttagaatcggcgtttttcgcgcgtaaatttcggcgacgcggggtcgcggggtggtcgtcggggtagtttcgtttagcgcgcgtcgcgtagacgttttcggagtcgttagttatcgtagttttcgtcgtttagtgtttttcggtttcgggggcgggcgtttgcgtcggttttcgcgaagcgggaaagcgcggcggtcgtcgggattcgggcgtcgcggtagttgtttcggttgtcggtcggcggtttcgcgttcgttcgtttcgttttcgttcgttgttttgttgtacgaatttttttaatttttttttttttttttatttttgagttatttttttgttttttttgttgttgcgcgggtgtttttatagcggagcggagattatagagtcgtcgggatgttttaatttttcggaggaggtggcggcggcgggggggattcggaattttgcgttacggacgagatgattttttttaaggacgagggcgatttttagaaggaaaagattttcgtcgagattagttatttcgaagaggaaggcgatttagttgatattaagttttttttggtgaacgagtttgaaattatttcggttagtaacggatacgaggtgagcgggtcgttgttttagtttcgagaggcgtggcgggtttttgggaaatttagagagggaggaagggaacgaaggcgttcggtcgttcggttgagggtttcgagtagatttttcgtttgttttggggtgtgtgcgtagttgggttttcggttcgtagtgtgtgtgtgtgtgtgtgtgtgtgtgtgtgtgtgtgtgtgtgtaggatgggaggtagaggggtagggtaatttattttaaatggattagtttagggggttcggtggttgaacggttggttcgcgggtaggaatttataatgtttcgttttcggtttttttgttgggttgaggggtgtcgtgttttaaagcgagtagggttgaataacgttattgataaattttttcgtgggacggaaaataaagtgtatacgttattttttggtagatgtttttgtaaaagtgcgttaaattattaaaggtttaggtggagacgagtagagttataggcgggaggaaggggaggcgggcgtgggttggggtaggcggggtcgtttttattatcggtgagtcgggtcgcggggagtaggtcggtcgatggggcgcgtattcgggttgcgggggcggtgcggggtttagtttttgcggttttagcgtttgggttagtagttgggagttgtgggtgcgtcgagtcgatttatcgtaagggtatattttggttgtatcgtttttaattttagttttttttaatcgttattatttggaaataaatttataatttttatttggggtttgggatcggattaggttttaaatttacgtagaagaaaggcggagaagtagcggaagtcgggtattagttttgtagggtggaaggcgttttatcgggttttttggttcgttgcgggcgatagagttggtaatttgagtagagtaaatagagatacgtgggtgttggttagagaaagcgcggagtagggtcgcgt

SEQ ID NO: 11509 - DNA, 801 bp, synthetic construct
  misc_feature 1..801: note = Description of Artificial Sequence: Synthetic polynucleotide
  source 1..801: mol_type = other DNA
cggttattaagcggttttttcgtgagtttcgtttaatgtttgtgcgtttaaattagtagcgttcgaggaacgcgttaattgggagaagtgaattgagggggttcggcggtcgttgaggaggggagcgcgcgggaggaggggcgaggagttcggaggcgggcgcggttggtagtttagagggttcgggcggaggtttgagagtagggttggaggggcggaggatcggggagattcgttcgcggcgttttcggtcggttttgagtaggcgtcgtggtagcgttcgcgttttttgttcgtttttcgtcgtcgttaggacgtaggttcgcgttagggttggcggtagggttcgtagttgtcggtttggcgtttttatttcgcgtagtcggtttcgtttagttttttcgcgtttgattggtcggattttgtttttggcggaggtaattgttcgcggattttttatttcgcgattttggttttttcgtaagtttttcggattcgggcgttttcggtttttttttatttatttttttgtcgggtaggttcgcgatttttcgtttttcgggtcgtttttcgtcgtattcggttttggtatatttttattatttagttcgggttcgttttcgttttgggtttattttagttttttagcgtcgtttgttgacggagcgcgggagttttaaggggtcggggttattcggtcggcgtgggtggtgttaggttcgggttatatttcggtatcggattcgagttttttagtttttcgagtaggattcggaggaatagaacgttaatttttttcgt

SEQ ID NO: 11510 - DNA, 311 bp, synthetic construct
  misc_feature 1..311: note = Description of Artificial Sequence: Synthetic polynucleotide
  source 1..311: mol_type = other DNA
cggttaacggtattacggaagtattagttggtatagaggttcggtgtaattatcgttttgtatcgtaaaacgggtttaggaagtttttaggagatattagcggtgttagaatcgagaaagtgacgatatagataatttatggatttcgcgtacgggaaacgtttcgttgggcgttaagaacggtgtagtaattgaaaaatcgtttagtgggcgttattggtaaaagcgttgttgtaaaatcgttagtttcgtattagaagtagagtcgttagatagaattcgggatttgaaattatcgaagcggagatcga

SEQ ID NO: 11511 - DNA, 1048 bp, synthetic construct
  misc_feature 1..1048: note = Description of Artificial Sequence: Synthetic polynucleotide
  source 1..1048: mol_type = other DNA
cgttttcgtaaatttttcgggttttacgttttgcggttattacgtttgatagagaaataattagtattagcggttgattcggttgttcgggttttcgtgtaggcgggcgggagcggataggttttggtacgtatgcgttcggggcgggattgcgttttaggtttgcgcgttgtcgttagattagcgggggggcggggcggcggcggatacgcgttttaggcggtagtcgcgcgagagggattttgtgtttcgttgatttttttcggggcgttttttttcgtgtcgttttttttttttttcgtcgcgtttttgcgaggcgttttttattcggtgggatcgattcggggggatggagggggtacgtttttataatttttttgggatttcgaagagacgttcgcgtgcgatttgagacgtcgttttcgtcgagggtttatgggcgcgtttttataggcgggtagtggacgtgagggcggcgagcggcggggtcgcggcgtttaggagggtcgcgttcgggttcggtttcgcgtaggtcgcgcgcgcgcgttttcgtcgtcgttcgggtcgcgttcgtttcgtttttaggcgtcggtttcggagttcggttcgcgagtagcggcggttgtcggagggacgatgagttgcgcggggcgggcgggttttgttcggttcgtcgcgttcgttttgttgatttgtagtttgtggtcggtacgggtagataacgcgagttaggagtattatacggcgtttattaacgtgacggtgtaggagttcggtcgcggcgtttcgtttacgtttcgtatcgatcgcgggcgttacgggtttgatttttttaaggtcgaggttcgcggttaggtgttggcgtcgttgtttttttacggaggtgagtgtcggttcgggggcggcgggcggtggtcgttgtatttcgcgtaggcggcgggattagggttttcggtttcggttttggttttggttttttcgcgttgttcggtcgatagttttagttagggtcgaggttttcgtcgtggatagttcggtttgttttcgt

SEQ ID NO: 11512 - DNA, 301 bp, synthetic construct
  misc_feature 1..301: note = Description of Artificial Sequence: Synthetic polynucleotide
  source 1..301: mol_type = other DNA
cgggaagtagtaggcgtacggtcgtttggatttttttggaggtgatggtcgagcgtttgttgtaatgcgttaggcgggaagtttcgtcggcgatgcgttcgaagatgtcgttgataaaggaatttatgatttttatggttttagaggagatgtcggtgtcggggtggatttgttttagtattttgtatacgtatacggagtagttttttttgcggttgcgtttgcgttttttgtcgttttttttttgcgttttggttacggtttttttggagttttttttcggggcgggagcggatttcgt

SEQ ID NO: 11513 - DNA, 1395 bp, synthetic construct
  misc_feature 1..1395: note = Description of Artificial Sequence: Synthetic polynucleotide
  source 1..1395: mol_type = other DNA
cggttttgtgaggtttacgcgggagcgcggaggtttttgggttttagggcgtcggtagatggtttgtagcgtatcgttcggttttcgcgttggttacgttcgttagcgttatttttttttttcgttttttatttttaaaaattcggcggtcgagtagtttcgtatttcggagggttttcggtgtaaaattgagtgggaaagagaaaggggcggagagcgacgagagagggaaggtggggaagaagagttcggtcgttttcggtttttttcggcgagttttgagtttttagggtttattcgtttttttaagtcgaattatagaaattttttattgttatgttaatgacgagaggggttgtggggagagggtttcgaagatttttttggaagaagggaagtttttttttttgttttcgttttttttacgtttattcgagttttttttagttagttttttgcgtttttttttttttatttcgagtttgaagagtcggtggtttagtttcgttttttattacggttttatgcgttttttatagttttacggttttttagtttagttttagaatagaggaggtggtttgggaattcggggcgcggtgttagtcggatttttcgtttttcggttgggcgcgttgcgggttgggtcggcgtatttgcggttattcggcgagttttggtttattgattttcgtttcgagagagtcgggagtttttttttttttttatttttcgttagtttattttttattgaacggtggggagggggcgggagcgggggacgttttttagtttttatttttcggaggtttggcggggcgggtagcggagtcgggcgcgcgtagaacgtagtttttgttttttttcgttttagtattttaaatcggtttttgtagtcgtcgtagtagttgtcgtcgtttaggttgtttgggggggcgattgcgcgttatttagacggcggagcgtcggggatttaaatgttattaaaacggtgatttattattgcggaagtcggtaaatttttgtaggaggtttagttattggttgatatcgttacgtgttttttttttagcgtttttcgttttttcgtttttttttttgcgtattgtatatttatattatttttttttttcggttttatggaggaagtgagaaagttggtatagttacgtcgggtttcgtaggattaggttatttagtgatagatggataatgtaagaatgaatttttttttggaatattttatatttagtagtggcgattcggggatttgtttagttcgagtttatttttcggattataggattataattttttagtcgtgcgcggttagcgttaatagttgcggcggcgacgatcgttttttagtgggtaggggggtgtagatcggttcgt

SEQ ID NO: 11514 - DNA, 766 bp, synthetic construct
  misc_feature 1..766: note = Description of Artificial Sequence: Synthetic polynucleotide
  source 1..766: mol_type = other DNA
cgatttcgttttatgtcggtcgtatcgtgttttttttaggttttattagtatttgggttgttatggtgagattaagatgggtttcgtttataattaacgatgttatttcgtagcgagttaaagttattttttattttgggttcgttacgcgatttttgtcggttttcgttttacgcggttttagtacggcgttaaggtttcgtttataaatcggtttcgttttttcgtgttcgggttcgtcgtttattagacgtcgtttcggcgtagcgagttgagggtacgtttatttttttttcgggtttttagtttttaaggttttagtataatgttttaggaggaagattttaggttttttttttattcgacgttgtttttgggcgagtcgaggtttcgtttattcgtcggttcggttttcgtttttatttgacgttgtttttgtgtagcgagtttaggttcgcgttcgtagtcgtgttattttcggagttcgtttttttgtttaggttttggaagcgttcgcgggtcgttaagttacgttgcgagttttgtttaggaacgtttagtcgttcgtcgaagtttagtattttcgcggcggcgttataggtgaatagtatcgggaagtagtcgtggttttgcgcggagggcgggggttattggagcgtcgcggaggggaaatcgaggtcggagggaaggttaggcgggcgtttggtcgttcgggaggtagatgttagtttaaggatatagacgggttatagcgagggaggttcga

SEQ ID NO: 11515 - DNA, 691 bp, synthetic construct
  misc_feature 1..691: note = Description of Artificial Sequence: Synthetic polynucleotide
  source 1..691: mol_type = other DNA
cggcgattagttttcgtagaggcggggttcgagtttttagttagagttttaataagtagtcgaagaacgcgggtagaggtttcgatatggttaggagagtacgtcgtcgttcgtaggtgttcgggtttcgtcgagatcgggaagaggtggcgtcgttagttttttttagatttaggggtggttcgataggtttaatttcgtttttcgttttgttttttcgttttttttttcggcgacgttcggttcgcggttggtcggttcgtcgcgcgtttcgggacgagggcgggaggcgagcgcgttggtcgtcgcgtatttattattgttaacgtcgtcgtcgcgttttttttattttatttttttttttttaggagaatttttagtttcggtttttttcgtttcggcgtttcgttacgtgatttcgggtcgttttttatacgtgatcgtttttttttttttttttattttcgtattcgttttttttttagttttttgtttcgttttgttggtcgttaggtatttcggggagaggtcgtttggaggcggggttttaggttttatttttcggagggtggagaggggcgggtaaattacgtcgagtgggcggggtttgaatagaggcgggttcgcgggttttttttcgtcgttttttcggttatcggacgagcggtttcgtgttcggtttttttatcgt

SEQ ID NO: 11516 - DNA, 1024 bp, synthetic construct
  misc_feature 1..1024: note = Description of Artificial Sequence: Synthetic polynucleotide
  source 1..1024: mol_type = other DNA
cgcgtatttattttgggttgtggagtttagttggtcgtcgttcgtttcggttacgcgttgcggttttacgggttcgggagcgagggtttcgttcgcgtcggatatgggtcgtttcgtcgagttcgcgtcgcgtcgttgtcgtttagttcgtcgttcggtagggcgtacggaggaagggttgtgaggtgttgggtgtagggaattgattgtttttggcggaaaaatatataaaattaaaaaaaaaaatgtttttagagaagagtatattatttttgcgggacgttttttttttttttattttttttttttaaattttatttcggggaagttttgatttgaaatttgcgaagaaaattgttatagcgtaagttgatagcggcggggttttaggggttcgaggtggatttagcggggaggggttggaaagagagatcgggtttgggagaatttcggggatggggattaaattttttttttttttcgttcggagattattatttattttcgtattttttcgtagtcgttttaagtttttttttttttttttttttttttttttgtttcggaaagttagcgagttttcggtagcggtcgtattttcgtttcggtggtttgacgacggcggcggtcgtttttgcgcgttttttcgttttttttcggtttagtttagacgtcgtagtggcggtaattgcggtagcggtggcggttttgatttcgcgtatttcgttttttttttttagttagtttattttagtcggtttttttgcgagggggttttttttttttttgtttttttttttttttttttatttttataattttgaaatatttttttttttgttgtttttttttattatattcggatcgggaaggtttcgaatttttggttagcggtttcgatgttgggagcggcgcgattcgggttcggtcgcgcgatttttcgcgttttgcgttgtttgggttaggaggttagagtcggtttgggttggttcgggttttttattcgggcgttgcgttttttcgg

SEQ ID NO: 11517 - DNA, 1339 bp, synthetic construct
  misc_feature 1..1339: note = Description of Artificial Sequence: Synthetic polynucleotide
  source 1..1339: mol_type = other DNA
cgtcgcgggttttggcgagtaggtgattacggatttttggtgtttgttgggcgagacggtgaagtaatttttttttcgttttttttttcgtttagaaaggtgtaagattcgttaaatcgtgcgttgtatagcggcggtcggagtagacgcgggatggtcgcgcgttttttgtatagtatagaggggtagtcggagagtttgggaaaggtacgagcggggaattagagtatagggtgcggattagaaagagtagacggttagtcgggcggggaaggaagttgtcgagttgtaggtgtggaaggggttgttttaggtttatttttggtagacgagggggcggggagtcgcgtcggggacgaggagattgcggatcgggcgcgttttttgcgtagtcgttcgttcgcgtgtttaagtttttcgggaatggttttcgtttaggggtttagttcgtcgtcgttagtttcgtagagtttgtagttgttggggttcggtagtcgttagggggcgggagttgcgtcgcgaataatggtcgcgtttggtcgcgggttggcgggaggcggagtggaggtagagtcggtgtcgggcgcgcgcgtcggtcgggcgtgttggggcgcgggagcggttgcgtaggcgggggcgcgcggcgcgagcgcgggagggcgcggcgggagcgtcggggaggcgggcggaggcgggcggaggcggggggcggggagttcgaggggtggaagtcggcggcggtcgagcggggttagttttttgtagtgtttgttaatgttggagtcgtttgtaaagtgttttcggtaagaaggtaaatatttttatcgggggcgttcgggagatttcgattttcgcgtcgtcggcgaagaaggtagagggcgttggggagttttgtagtttcgtagtacggggaattcggagaaaagtagtttttttcgcggttttttttttttcgcgtttttttttttatatcgggttttcggggtagtagcggggaggggagatcggcgggggagggaggatagggaggcgaaggaattggggtggggggtgcgtgtgtggtggagggggtgggacgatataggtgttttgaggggaggagtcgggaggaaggcgaggaggtcgggttaagtgggggtgcggaggtcggggagataggaacgcggttgcgggcgcgggaggttggggttttagggggtcggggtggtagcggtcggaagagaggacggcgagtgtagttacggtgtggttgcgagggagagggagcgtttagagtagggtaggggagggcggttcggggagggtttgcgggaaatgggtttgggggcgttggaggcgg

SEQ ID NO: 11518 - DNA, 2273 bp, synthetic construct
  misc_feature 1..2273: note = Description of Artificial Sequence: Synthetic polynucleotide
  source 1..2273: mol_type = other DNA
cggtttttagggatcgaggggttcgtagagtgatttattttattttcgggaagttgtcgggagtttcgcggattcgtcgcggtttttagtttttatgtgtaggggtttcggggttggggtttggttagtgcgacgtttcgttcgcggttatttatagttgttgaggaatagtagtatcgcgaagtcgagcgtggcggtggttagtaggattaggtaggcgttgtagggtattatgaagtttcgtattagtagggaggcgttaggcggttgtcgggtgtttcgcgttagcggtagcggaggtatggttcggggtttcggttttgcgttttatttttagagcgtgggggttttttacggggtgtttttgggtttttttagggttgttcgttttattttgggatttttggggcggcggatagtagttgtgtttttagagtttatttagttatagttttgggggtgttaggtttcggttttagttttttaggtttatcgtgggaggagggtagaattttttcggagtagaaattttaaatgtgggtttcgaggtaggcggaggagggattgggagttcgtagttatttttgttgtttatagttttttcgggttggtcgttagcgttcggttttttcggagttttcggagtcgcgtaggtcggagaggcggtgcgcgcggtaggtgcgcgggggtcgggcgtcgagggtttgttgttttcgttttcggtagaggcggaagcggcgataggagcgggtaggtaggaggggcggtcgcgtcgggagcgagaagaaagcgtcgtttgcggaggtcgcgtcgggtttcgggttttttttagtttttttcgttttcgcggggttggggaggtgagtgaggggcgaagacgtcgcggagggagggcgggagtagagataaaggaagtcgtttttagggatttcggcgttcgcggggagttttagaggatcgggcggatgcggacgggagagcgtcgtataaaagggaacgtcgggtaggcggggtcgggggtgtttggttggggttggggttggggttgggttcggggtcgggagcgttggggttggggttgggtcgggattggggttggggtggttgaggttggggtcgagggtgggtttgaaggtgttgggattgggggtgggattggggttgggtttgggggcgttgaggttgaagttggggtcgggggtgggattgggggcgttggggttgggtcgggggtgggattgaggttgcgggcgtttaattgggattgagtcgagggtagcggtggggttgggtcgggggagtaggggtcgcgtcgggtagcgtcgcgtgttggagcggaggcgggtgcggtcggggtaggtcgcgggaggaggaagcgtttggggagtaggagttgggtcgggcgggttcgcgtttcgtattcgcgggggtgaatcggagtcgtcgtagggggttcggggggtcgcgtgcgatcgcgtgtgcgcgtcgtcgtgcgtgtgttcgcgagtgtttgcgttcgcggtttcgttttggcggggcgtaggtgggggagggttttaggtgcggcgcgagttggagggtggagtgaggtgagcggtttagaaatcgtttcgtttatttttttttggggattgatagtggtttttttagtcgtcggcgttttcgattttcgcgcggggcggggttatgtaaatgagttttatgtaaattgcggcggggattttttgcgggttcgtggggttggaacgtttttaagaggtcgtttcgggaacgttcgggttttgacgttattgcggttcggggcggggaatgggggtttgggtttatttgggatttttgacgcgtagttcggcgtttttatattcgttttcgtaggtcgtttttttttttggtcgttgtttagtcgggggattcgggggtaagggaggggttcgttcggttcggtgtgtgtattattttttagagtttatgttaggttcgattattttggaggttagaatttttcggcgatcgtattttagcgttttcgtatatttttggttattcgtagtttttggaagggatttttgcgtatttattattttgtttttttttttgtttttgtaatgatcgattttattttttaagttttagttttaggaaagtaaggattcggcgttagggcgtttttgtttcgttagttttttttagtatcgcggattaagttatttgttatattcggttttatttattttgtagacgatagttgtcggtagttattagtgttatcgcgt

SEQ ID NO: 11519 - DNA, 5586 bp, synthetic construct
  misc_feature 1..5586: note = Description of Artificial Sequence: Synthetic polynucleotide
  source 1..5586: mol_type = other DNA
cgggtttagtttcgtatacggattcgttaggagtaggtggttagtacgcgttgttggcggcgtattacgtaggtgtaggtgtttttattgacggcgttggcgatgatgtttaggtgcgtttcgtttagggttaggtagtcggggtaggagaattttaggggtttttggtttttgtattagttgtaggggggcggggcgttttttgtaggtatagtttttttcgttgtttgtttcgtatttttgttttaaggtcgttcgcgggttgtttatttcgaggatcgttcggggcgtttatttattatatttttttttttttgtggaggattttttggtcgtagcggaaggttacgtttttgttttcgggtattagtttggttttggttttggggggcggtggggtggtggttatcgtggggaaggggaattttgtttcgggtgggggaaagagtttcgttagtgtttttttagtttcgattatggttaaggtttagtttttacgtagttttgtttcggtttcgtgggtattatcgtagtagaagtcgtagttgttggggtagagtttttttatgagtcgtcggcgagcgtcgtagaagttttttcgcgtttaggacgcgtatacgaatagtttgtcgaggtattttgtcgggagcgtggggagtacggtttggtttaggatcgttcggttttcgttttttcgttcgataaagggatttatcgtagagtcggtgtagtttttatagttcgttttgggataacgttttttagtcgcgtagcgtggcgtttaggtgtatgagcgttcggtcgtgttgtgagtgtattaggtttagcgcgtggtcgatttcgtgggtcgttacgtgtattaggttcgtgagttatacgtttgcgggtttcgggggttagcgtttgggagtttcgggtttagtttcgtcgttcgtgggttagtttttcgaggttcggtgtatttgttggagcgtagtcgcggagtcgttttcggtcgtagttacggaaagataagaatgttttgggtttaggcggtgagttcggtttttaggaatgtagttttagttttcgttttagaggcgtagggggatgggaaagggagtttagggttgtcgggatgggggtttttacgggtttttttttttgtttgttagattttagtggtagttattatttcggaaggttttttttgtcgtttgttttaaagttcgatcgcggtagtttattgtgttgtagaggagaggtttttaggaggttagtttggacggttattttttttttagttgtagcgcgtggggtttaggatttagtattcgttgtcgtcgaagtggatgtcgtcgtgcggggggaagaaggcgtgggttagttttttcgtggggtcgtcgaagtagtggtgtagcgcggagattaggtagttcgtgtggttgatcgggtagaagtttggggggagtacggggttgagaggtcgggcgcgtagggtcgggtcggggcgggggcgggcgtttatttattcggaggtcgttgggttgttcgggggttatttcgcggaagttgaagggggatacgtcgttttatatgcggaaggcggtagttagggttcgtcgcgtttttcgcgggtttagtaggtttcgcgggaaggagaggattttgtagggagagtgagtttagcgggcgtcggtcgcgttttttttttcggggtttagttagggcgtatttgtaggtgaggttgaagtggttttagcgtagtttggttggagttagcgtgtagcggcgtttgcggggggttagtgggttcgggattcgggtgggggggatcgtcgagaggtttagcgtagcgacgtttttttttagggaagaaagcgtgcgtgggaggtatcggtgacggtttttaggattaaaaattgtcgcggaaaatggattggaaggaaacgggggtgggggtgtttagggttgggagcgggcgtggcgggttttgtttgtttgtggtttcgggttttttaatttgagcgttttgttgtacgtttttgggaacgcggtttagtggaggggaaggggttgaatagtagggcgaggttttttattttttttaataattggatataggggcgtttaatttttcgatttcgggacgtatattcggatttttaaatatttcgtatatttcgtatacgttttgcgggtttttcgatagattagatttatagacgtgaggatttttttaattcggtatttggtttttttttcgtcgtttatttgcgttgcgttttaggtcggtatcgtcggggtttttagtcgggttagtagtattagcgcggggaggaggtatagggcgattagcgcggttttaagttagcggcgttcgacgtttgttttcggggttttcgaggggatacgggtttcgcggtttatggtagatttgttgtggggtttagggttgtatggggtagtaaggcgcgggggttcgggtcgtagagttttcggggaggattcggaggggaggtagtggttcggcggttcgggttatagttcggtgtggtgggggggagggagacggggcgggagagggggtaaggttgtttttgaagggaattagttggttcgttcgttggtcgagttgtttgttgtttttagtcgggggtatggggattcgcgtttcgtgggttaggggtagaggtttgggtatggtttgttgggcggggttttcggaggggggagcgaagagggttttaggtagttcgggaagggtagcgttagggttttcgtttaggaaagggtagtagtgggggtttttaagtttttattgttgggtagtgagtgatttggtggttttttttttaaatggaatttttaaaaaatttttgagttttatatgagcggagtttttattttggtttaggtagttgagttgggtcgtaggagacgcgtcgttcgtttgatagtgttttcgagagttgggaggggatggtcggatggggacgtggtagtgagtatggggcggtggagggggaggcggggagggggtgcgtgggtaggtaagggtcgcggagggtgttaggttgcggggcggagggagggaatttgttagggtttttcggggagtcgggaaggggcgggttttggttgcgggaagtttcgtggagggtagcgcgtgaggtggagggtgtgtggtttttaaattttcggttaggttttagtaaaggggagagggagacgggagggacgggaaacggagttaagcgtcgggtttggaggtttggatcggttttgattgggggcgggggcggggagttcggagatttaaaggttcgacggggcggtcggcgtttaggcgcgagcggttttgggttgggatcgagatcgggtatcggcgtttcgcggggcgggggtgggggattgggtagaggagtaggagatttcgagttagatcggtttgtgtttgtttcgttttttttcgtttttcgcgtcggcgtcgggtttagggtgacggtagttcggttaacggggttagcgttaagtagttggcggcggtcgcgggcggtttttggaaagcgcgagaggttgggtttggtcgtcgtatttgtttcgatatcgtttttcgtttttttagttcgttatttcgtttgcgtgcgttcggtttttagattttgtttgggacgttttttaattaattttttgttgggacgggattttatagttttggggagtgtcgggttttttggattagagcgcgagttttcgcggtcgtttttaggacggaagagcgaggggggttcgggggtagatataggagttttcgtttcgtcggattcgggtttggggggcgggaggcggtcgtgttcgcgtttgaagggtgttttggttcgaaggtcgtagttcgggcgggagtttggattcgagagtttggggcgggcggggcggatttagggaagggtttttttttttcgtttttaggttcgttcgcgtgtttcgaggggaggattttagaggcgttcggttttttaggtagatagtagaggtaacgttcgagaatttttttttttataaaatatagggcgggggtacgcgaaggtagttcgggcgcggcggacggcgcggtttatacgaagatttggatgcggtcgcggatgggttggcggtagatggggtaggcgttgagcgcggagtcgtagggggcgtatgcgtcgtggtcgtattggaatacgaggcggatgtggttgtcgatgtagatggggtaggtgatgcgtttttttatttgtcggtagcggttttgtagtttttttattagttggcgcggcgggtcgggggcgggggcggcgttcgttattttagagtcgtttgcggggtgggggacgggtgtgagttgggaggtcgggtgggggaatgcggggagtagggagttgcgggggggcgaggttgggggcggggtgttatttgggacgggttgtgatttgtaaggggggttggcggggtgggtgatttggaggtagaggtggggttcgggtgcgggtaggaggtgagtcgtggaaattaggtataaggtggtgtgcgggttggagttagggttgtaggtgggttgtgagttgggtcggggtgtgatgggggggcggtgttttgggtgggttgtgatttggggtggggttatggagggagtgtgatttgggaggggtcgtgaaatttagcggggttggggtgtgatgggggaggagggtgttattttgaggcggggttgtgggtcgggtgtgatttggagtaggtggggttgggggttgggggttggggggtcgggtgtgagttttgggagggcggggtgtaatttggggaagggttatgggcggaagtgtgggagggaaggggtgggggacggggattcgcgggttattagttgagtaggaggcgtgttgggggcgtagagttttatttatttgggcgtagttttttgttgacgattatttggtatttgatgtatttttttattttgcgcgcgtattttgcgaagaggagagcgcggttggttgcggttttattagtcgggtttttttatttcggggttttttatttatttttatatacggtgcggtgttggtacggcgagaatagtattagtagcgttagttcggagtatattaggtatttagcggtttcgggtttcggcgcggcgtttacgtgtaggttcgttacggtgttgggggtttcgagcgtttgtttggggttcggggtcgcgttttcgttcgtttgtcgttttttgtagggggaggaggcggtttgagaggggttcggaggtcgtcggattttattttcgtcgtttacggatttatcggaagcgttgggcgtagttttgaagggttttgagtacgcgattttcggcggttaggtttagcgggtttcgatcgcggtggttggtgtagtttacgtcggcgttttttagcgttaggaagtaggcgatcgtcgcgtttatcgttagtttcgcgttgtcggggaggttcgaggtttgtagttgggcggtaggatagacgtcggtgagggcgggcgtcggggtaggttcgagggaggcgttttttggtatttggtagttttagtagtcggcgt

SEQ ID NO: 11520 - DNA, 1264 bp, synthetic construct
  misc_feature 1..1264: note = Description of Artificial Sequence: Synthetic polynucleotide
  source 1..1264: mol_type = other DNA
cgcgggtgaatcgagcgttttttcgtttttttggtttgtagttagagatagtttttcgtcgttcgatttcgtattcgttgaggagcgtagggttgtgttcgtatttcgtttcgtatttgtttgtttagggaaatcgggagtttcgcgggtttcgtcgcgggaaggaggcggtattgggttttaaaaattcgtgttgaggagaagtcgagcgttttaatatattcgtcgtcggtcgggtcgggttttcgcgcgtttcgacgtcgttttagtttcgttcgcgcgcgttcgatacgttcgttttcgttttcgttttgatatagatatacgcgcgcgttttcgtattattttagaagtttattcggttcgcgcgcgtatttagatacgcgtggtttatattcgtcgtatacgtttttcgtataaatacgcgcgttttttacgttttcggttattttagatatacggtttcgggttttacgtaggttcgggcgtcgatatattttcgcggtatggatacgcgtgttttttatttatttttcggttaaacgtatttttttttgtagttttttatttttgttttttatatttattttttattttcgttttagaaatacgttttttatatcgggttcgtcggatttttatattttttattcgcgttagaaacgcgcgtattttcgtggtttttttttgtcgcgcgtaaatacgttcggttcgcgtacgttttttcggtttggtttcgtatattcgcgttagaaatacgcgtggtcgcgtattacgttttcggttcgcgagtacgcgtgtttttacgtttcggtttcgttttcgtttcgcgcgcgttttcgttggtcgtcgttttcgatcgtacgcgtttttcgtttagtttcgcgtcgtcgcgtatttattcggatttgttgagttcggtttttgttcgttaggtttgcgtcgagtcgtcgtttattggttttcgcgtttcgttcggtttcgttcggttcggtttagttcggtttcgcgttcgtttagttttattcgtcgtagttggaacgattcgcggggtttcgggtatcgcggttttttcgttattgttcgagtgcgtcgttcggattaatggcggggcgcggcggtgagtttatcggattagatttcgttttttaggtcgcgtggtttaatcggaggatgcgacgttattcggagtcgggtagaggttggtgcggggcgcggagtcgttcggcgcggggattgcgtcggaattgcgttcgagtcgcgt

SEQ ID NO: 11521 - DNA, 716 bp, synthetic construct
  misc_feature 1..716: note = Description of Artificial Sequence: Synthetic polynucleotide
  source 1..716: mol_type = other DNA
cgacgggcgcgtgaggtttagagaggagtagtttcgggattcgtttttttttttgtttgattttggttaggaaaaggggtttggagcgttttcgggtttcggaaacgcgggatttttcgtaggtagtcgagtagggcggtcgtcggggttatcgttgggcgtcgtcggagttttaattcgatttatgtgcgggatttcggttttttgtgcgggagttttcgttttgcgcgtcgggttttcggttttcgttttcgggttgggattcggtttttcgtcggttttattgagttttcgtttcggatttgtcgatttttcgatttcggggagagagattaagagattgggacgtaaagggcgtgaggatcgtattttttattcgtaggtttttttaggggcgtcgcgtcgggggtttcggttggcgatcgagtaggtttcggtcgagtattgtcggcgttgttatttgtgtgtatcggggatagggacggagggacgcgatttttatttattcggttcgtttatttgggtcgttcgcgtttcggcggtttcgattcgacgttcgagttagcggagttcggagtcgttgggtttttcgtttttttcgttcgttcgtttttttcgttttttcggtttttttcgtttcgtcgttttgcgtcgttttattataaaaggtgaggttcggggggagggggcgcgggattttcgtttcgcggaagcgg

SEQ ID NO: 11522 - DNA, 619 bp, synthetic construct
  misc_feature 1..619: note = Description of Artificial Sequence: Synthetic polynucleotide
  source 1..619: mol_type = other DNA
cggtggatcgtttgggcgggtaaacgtttttttacgttggcgggtaggatttgaattcgggtttttagggttttgtaggtcgttattgttttcgttttttttttgttttcggtttttttcgtttggtttgtcgcggttcgtcgttttttttttttttttttttttcgttcgttttttgttttttgtttttttttttcgtttttttttattttttgtttttcgcgatttttttttttttttcgatttttcggcgtcgttttttttttttttttgttttcgtagtttaaatacgcgatatttggagtaatagtagtcgttcggcggtttgggttttattataggtcggtttttatcgcggcgtgtattatattattttattttaaagaattcgtagagaaattcgtttcggtcgataatagaaagtaaaaatatagttgatttttattagggtttttttataggtttcgcgtgaggtaatgaaatatggaagcggtgagatatgtaatgttttattaagcggttttagttataacggcgtgtatgttaattacgtttgtaggttatcgttcgttttcggttgtcggattatttagcgcgttttttttcgagtttcggacgg

SEQ ID NO: 11523 - DNA, 293 bp, synthetic construct
  misc_feature 1..293: note = Description of Artificial Sequence: Synthetic polynucleotide
  source 1..293: mol_type = other DNA
cgttttacggggtaaatttcgaggtttagtttcgcgtgggagtcgtagcggggcgggttcgttttgggttgggcgggtttttttagcgtagcgttgggggttgcgggttttttagtagtcggagtagtattttgagtttcggttgttggagcgttgggatttttggttgtcgttttcgtagtagtagtaattattatttcgttgtcggcggcgtttttttgggaagtagtagtaattggtggagttggagtcgtagtagtttgagtcgtcgtagtagtttttgtcggagtcgt

SEQ ID NO: 11524 - DNA, 2748 bp, synthetic construct
  misc_feature 1..2748: note = Description of Artificial Sequence: Synthetic polynucleotide
  source 1..2748: mol_type = other DNA
cgaatcggtttttttcggtttcgtattttttagggtcgttcggcgagtttttgtatgttttttattcgttaagttcgttattcggtttcgtttttttatacgcgtattggtacgtttttttttagtttttagcgggcgggtagtttgtcgggtatttaggaagttcgggtttttcggcgtcggaggatttataatttagttatcgtaataagttcgcgtagttaaagtagttcgtttgggtattaggttttatcgtttttgtttcgtggttttaagagggttcgtgttagttttcgaggtatggtcgtttggcgttcggtatattttagatttatttttttttgagggtaggggtttttcggggagagaaagagtagtttcggggttcgtttcgggtttttttgtatagattttttaggtacggagaataatggaatagttttgcgcgttttttttattcgagtaagttttgttttttttttttcgtttgttcggtttttattagttatagggtaaaggtttttcggttaaataggagtttcggcgttaacgtttagagttttcgatacgttttaaaagatttgcgggtgtaggggttggggttagagtcggggttgaggtatcggatatgcgtttagatgcgtatagttggtagttcgttcgttttcggttttagacgttttttttagttagaatttttatatcgcggggaaattcgatttgcgtttttattcgggatttatagaggaagtggagttttagttgtgtttcggggttaattagtttttatatttgtttttttatatttgttttttagattcgggttttcgttggacgttttttttgtaatgcgggatgtttttgttaagcgtaggttatattataacggaggtttttattagttttaggttttgttatattgggattttggttttatttttgagagtttgtaatttttttattttttattttattgtttagttttatttcgggtaggttagagtcgagttcgggttttcgtttgtaatgtttttaagaaggtatatttgagttatgcgtatttggaggtgggttagtttagtatatttgggcgtaatgtttattatagtttgatcgtgaataggagggtttttcgggaaggcgtaaggggagggggtttcgttttttttatattttttttagtagttggttaggagaaagttaggggcggggcggggcggggcggtaggatttatttagtatttggttgaagagtagttgttttaggttttttagtacggttattattagttcggggtttattttgaggaaggcgcgttttttttggtttttggtagaggggataggtttagagtttttttgcgttttggttttgttggagagtagttcgtcgttcgatttgttattttcgtttacggtcgttttaggcgttttgttgagcggtttgattttcgtatagggttttcgagggattcggttcggtttttttaggttgggcgcgagcggagttaggggggttttggcgtcgttcgtcgggttgtttttggtttggaagagcgagtgtttcgatttggatagcgttttggatattagcggagttttacggtttttggattttattttgtttaagtttttgggcgttttggttatatcgtcgttttattcgggtttataaagttgtagttttttttcggagttcgtgagaaaagagaggttggtgagtgatttttgtttgcgtaggttggaggcgggcggttcgtcggggatacggttgtttacgttgtcggatttgaagatttttagtttagtcgcgttggttttggttatgtcgtcgtcgtcgtcgggcgttttggcgcgtttgggtagtatgtttttgtcgttcgtcgttgtcgtttttttgtcggcgtttcgcggttcgttcgcgttttcgtcgtcgtcgtcgttgtttagttttatttcgggttgtacgtttttgacgttgttgtttagtattttgttcgcgaggagcgtatggacgattcgcgcgtttgtaggtacggggggagggggtagggggcgggagcgtaggaggaggaggcgggggaggaggagggggagagagaggacggaagaaatcgaggaagaaggggagagaagggggagagagcgagggaggagggagagaggtaagtcgagggcgtaggggaaagaaacgcgaggaaggaagtcgggaaaaaggaaagagtagggaagtcggggagcgatagggcggggtcggaggaaaaggggcggggcggcggggaaaatataaattaaaatttaaaaattagttaaaggaaggatggaagtttcgcggttttttcggcgtttagcggtgtttttgttttggtgttcggattttagttcgcggtttgtttgtttgttagtttcgtggatatcgtattgtcgggtagcgtttcggtcgtatttagttagttagttagttcgagtcgaggttgtaggttgtagtttcgagtagaggaaggagggaaggggaaggcggggagtaaataggaggaggggagcgagtgtgcgtacggggagggaggtgggggagagatagtgtgtttatttttggttcgggagggggaggtatttgcgagcggagttttaggggcggatgagtggggggtagggggaaataaaggaaaagtagttttttttttagtttttcgcgtagaagcggggcgggtttttggattttcggagggtacggggattttttgtcgt

SEQ ID NO: 11525 - DNA, 433 bp, synthetic construct
  misc_feature 1..433: note = Description of Artificial Sequence: Synthetic polynucleotide
  source 1..433: mol_type = other DNA
cgggattgggcgttagttagtagttcgtaggattaggcggggataggcgggtagtatttataggtaagtcgttagggggtttaggtttttcggaacggcggatagttcgagtttagagtagtcggtagatagtatgatgtcgtttttttggtagtggtagggggtcgggtaggcggtgggtttcgggtcgggttggggggcgtcgtcggtttttcgggaagcgtatagcgcggcgtaaagttatagcgttcggagtttcggcgggttgggtatttcggcggtcgggttattggggtatttggcggtcgggcgcggacgtacggcgcgatggtcgtagttgttttttttcggtttcggcgggttgtatcgtcggtggggatcgttttaggggttttattgggcggcggcggcggcggtgggagcgtcgggacgg

SEQ ID NO: 11526 - DNA, 1376 bp, synthetic construct
  misc_feature 1..1376: note = Description of Artificial Sequence: Synthetic polynucleotide
  source 1..1376: mol_type = other DNA
cgcgggatttttatttttgcgaggtttttagagtttttttgggaggaggttttcgttggaacgtgtttgggtgaggagagggagatcggtttttaggtagggacggttagggtgcgcgtattttagtttttgggttatttcggcgggagtttgcgttttttttaggcgcgatttttaggaaggtttcgggtggtgatcgtagattggagagtgagttgggttggggaaagagtgaggcggatcgtttttaattttcggtaaagtgtgcgttttcgttttattatttaggggcggcggtttttgatgagtttatgggggcggggcgttaggagtttcgttcgcgagtttttttttcgttttcgcgaagtagtagttcggaattcgcggttagggattcgcgtaggtttttttttagttgaggggcggtcgggtattcgggtttcgattcgcgattatcgtatttattattattatagcgggaattgttcggcggtttttagaagtttcggttcggtcgtagaggtgggttttcgagtatagaggtttcgaaattcggttcgtagtttttagttttaatgtcggggggcgcggtggtttcgggcgattttttatttcgtttttggagtttataggtggttttataatttcgcggttcgcgttgcgttcgcggggtttagtacgttgtcgcgggatttgtttaacgtggagtgtgtgtttgttttttttcgtttcggttttcggcgtagtttttatttagaagacgaaattgaagacgaagagtaggtatttgatgtatttggtgtagttttttatttttatggcggcgcgggcggcgggcggtttgcggggcgcgggtcggttttgggcggcgggcgggtcggcgcggggtttggcgggtggtcggtaagggggtttggcgggtcgaggggcgggggcgcgaagaaaggggcgcgggggcgcgggggcgcgggggcgcgtggggcgttgggcgtcggaggtttggtaggatgcgcggtggggtcgtcgtcgtcgtcgtcgttgcgcgttcgttttttggtcgggcgcgcgtttcgtttcgtagtatttatagggcgtcgcggtttcgtttttttataggtttcgtttcggttagtttacgtttcgttttcggtttcgttttttgtcgttagggcgcgtagtcgaggggtatggggtcgttgtatttatttttaatttggcgcgtttcggttaggattttagggtttaggtgtatcgtgttgggcgcgggaggcgtttttaagttgttgtcgcgtttcgagtttttaagggggtggtagtagggtcgcgtttgaggataggtatgtagcgtttgtttaggagtgtagtttcggtgtcgg

SEQ ID NO: 11527 - DNA, 3393 bp, synthetic construct
  misc_feature 1..3393: note = Description of Artificial Sequence: Synthetic polynucleotide
  source 1..3393: mol_type = other DNA
cgtagcggaggcgggaggagagtttttggcgggtatttgtttttcgcgtttttcgcgcgtttaaggttgggtttcggggtattttattcgggtcgtttcgggtttagttttagtttagaatgattttatattttttatatttttaagttttagaaattatcgttttgagaattttaaggaggatattttttttcgggttttttgtagcgtcgagtttcggtaggttttttcggcgttcgtttgttgcgagatttttttgtcgtttcgaggagtacgagattttagtcgtttgtagattatttatatttgcggagggtggtagtaggggtttggttggtttgaaacgcgtcggggaggcgcgcgttgtattaaatttcgtttttgtttttaagggtagattcggggtaaggggattaagattttcgacgtatttagcgttatggggatagttatggttaatattttgtttttgcggttaattttaaggttattaaaattttttattcgtagagagcgcgtatagtagtgcggatattcggggattgttttaaggaaggttgagttttgggagcgcgtggatttcgttttatcgttcggcgattggttcgcggggttgggggcggagatcgagttcgcgttgtataaatatttatgagtcggtagcgcggcgcgagcggggttggagtcgggaagttgggttaagggcgttgttttcgtcgaggaggaggcggcggttgggcgcgggtcgcgttatttaggtgttcgtttcgtttttcggtttggatttgtttttgggtgtttagtaggaaggagattgtgtgtatttcgttcgattgcggtcggagcgcggcgttgatttttttaggcggcgggggttcgtttgtttcggcggcggacggacgaaggacggacgtcggagaaagagggcggcggtttgggtcgaggcgggtttttaatttcggcggcggcggcggcggtttggttttgggggcgggtatgagttttcgggggtcgagtggtggtcgttagggttgattcggcgcggtaagcggttcggtttagttattttgattgcgtatcgcggttttagaggaaatttgcggcgttttcgttttttttgttcggcggagttatcgtcgttcggcgcggcggggagaagtggtcgggcgcgcggagaggaggcgagcgagcgcgggacgatgagtcgaggttcggtcgttttgcgtcgcgagggttgagcgcgattcggggttagtagagcggatttacggattgtggcgcgcgtttgtagtcgtttttaaattttcggagcggcggaaaggagtgcggaagggttttgtttaggttgcgggtcgcgtcgttgcggacgcgtttttagaaggggttagattatcggtagatttttttttcgggcgaagtataagggagattttagattattcgttgtattcgtttgcggttttttcgtgggtttttttttcggtatttttttgcgcgtcgtttggagggcgagggtatcgggtcgaggcgtatagtatggagtggggttatttgttggaagtgatttcgttgttggtcgttttggcgttgttgtagcgttttagcggcgttgcggtcgtttcggttaaggagttggtatgttaagagattatcgtgtcgttgtgtaagggtatcggttataattatatttatatgtttaattagtttaattacgatacgtaagacgaggcgggtttggaggtgtattagttttggtcgttggtggagatttagtgttcgttcgattttaagttttttttgtgtagtatgtatacgtttatttgtttagaggattataagaagtcgttgtcgttttgtcgttcggtgtgcgagcgcgttaaggtcggttgcgcgtcgtttatgcgttagtacggtttcgtttggttcgatcgtatgcgttgcgatcggttgttcgagtaaggtaattttgatacgttgtgtatggattataatcgtatcgatttaattatcgtcgcgtttagttcgtcgcgtcgtttgtcgtcgtcgtcgttcggcgagtagtcgttttcgggtagcggttacggtcgttcgtcgggggttaggttttcgtattgcggcggcggtaggggcggtggcggcggggacgcggcggcgtttttagttcgcggcggcggcggtggcgggaaggcgcggttttttggcggcggcgcggttttttgcgagttcgggtgttagtgtcgcgcgtttatggtgagcgtgtttagcgagcgttattcgttttataatcgcgttaagataggttagatcgttaattgcgcgttgttttgttataattttttttttagttaggacgagcgcgtttttatcgttttttggatcggtttgtggtcggtgttttgtttcgtgtttattttcgttatcgtttttattttttttatcgatatggagcgttttaagtattcggagcggtttattatttttttttcggtttgttattttttcgtgtcggtgggttatttagtgcgtttggtggcgggttacgagaaggtggcgtgtagcggtggcgcgtcgggcgcggggggcgttgggggcgcgggcggcgcggcggcgggcgcgggcgcggcgggcgcgggcgcgggcggttcgggcgggcgcggcgagtacgaggagttgggcgcggtggagtagtacgtgcgttacgagattatcggtttcgcgttgtgtatcgtggtttttttgttggtttattttttcggtatggttagttttatttggtgggtgattttgtcgtttatatggtttttggcggtcggtatgaagtggggtaacgaagttatcgtcggttattcgtagtatttttatttggtcgcgtggtttgtgtttagcgttaagtttatcgcggtgttggcgtttagttcggtggacggcgattcggtggcgggtatttgttacgtgggtaattagagtttggataatttgcgcggtttcgtgttggcgtcgttggttatttatttttttatcggtattatgtttttgttggtcggtttcgtgtttttttttcgtattcgttcggttattaagtaataggacggttttattaagacgtataagttggagaagttgatgattcgtttgggtttgtttatcgtgttttatatcgtgttcgtcgcggtggtggtcgtttgttttttttacgagtagtataatcgttcgcgttgggaggttacgtataattgttcgtgtttgcgggatttgtagttcgattaggtacgtaggttcgattacgtcgtttttatgtttaagtattttatgtgtttagtggtgggtattatttcgggcgtgtgggtttggttcggtaagacgttggagttttggcgttttttgtgtattcgt

SEQ ID NO: 11528 - DNA, 1381 bp, synthetic construct
  misc_feature 1..1381: note = Description of Artificial Sequence: Synthetic polynucleotide
  source 1..1381: mol_type = other DNA
cgttttaacgtgttgttttggtattaggacgcgtatggggaggtggagataaacggtgcgtggggttcgcgtgggcgcgaggaggggtcgttacggtttttttgagagtgcgttgttgagttcggttttggaggcgtgcggcggggaggggttagttttcgggtgttttgtgcggttcggttggggttaaagttcggggcgggtttgtttttgtgtacgtgggagatggttaggggtgttggggatttcgagggttggtgtgaggtttcgggagttatcggggtgattggtcgtcgttcgtagacgggaagttttacgacgtttacgttttttatagcgattgtttcgaggatcgtaagttcgtgaattttattttaaagtcgtagttggagcggcgtcggggttataagttttttttggacgatcgcgattttttgtcgcgcgttggtatttcgggttttatttcgtgtttcgtttattcggagggttcgtttcgtttcgttttatgtttcgttttattcggggttttatttttattatcgagtttcgtttttattttcgtttattcgaggtttcgttttaaaaattcgtttatttcgtaggtttcgttttttttttagagttttgcgttcggtatcgtttttgagttttcggtttcgttttttttcgttttcgtttttgcgtcgtcgacgttcgttttttcgtagagtttttcgtcgattttttggtgaatttgagtcgttgtcgacgttttatcgtggtgttttcggacgtttttttgagtcgggtttggtgtagttatagttttcggtgggtttcgcgcggggttgggtgggttttagcgtagtatttatttttttgacggtttcgtttcgtagggagggtttgtgtcggttgttggagtttattcgtagatttatttttattattttcgagggttagaggcgcgatttcgcgtattcggcgtttcgtttgttgcgttagtatcgttatttggtgattttgttgttttggaggttcggtttcgtggtgcggagtaggcgcgggagggttcggggttagcggcgggttagagatgggcggtgttcgggttttaggttgggattttttcgtggggagttttgcggtattacgttttgtgaatgggttttggggggaggtttcgttgtttggggtttcgatgcggggagtcgtttttgaggttttcggagttacggaatagttgtcgtagggcgtggaattcgtgggtagtcgtaggtgtgtttttgggggttaggacgttaggggttttcgaggtgtttatatttgtaaatcgtttcgatttggtttttagattttttttttcgatttttggaaagaagtgtagttggcgttgtcgcgg

SEQ ID NO: 11529 - DNA, 493 bp, synthetic construct
  misc_feature 1..493: note = Description of Artificial Sequence: Synthetic polynucleotide
  source 1..493: mol_type = other DNA
cgagttgtttttgggcgcgtttggggttgtatttgggttacgtgggcgtcgttgtgtagtcggtatttttcggttaatttcgcggtttggagaaggggttttgtattcgtcgtcgttgtttgttttcgcgcggttttcgtttattgttttgcggttgttttgcgggttgaaaagtttttttcggtgtagaatttcgggtttagcgatagtttgcgtcgagtgtgcgtatttgtcggagattcgttagttcgtcggtcgcggtgagtggtttttggagttattggtttagggcgggttcgcgggatggggcgggcggttcggggcgtagtcggttaggtcgttgttatggtaacgcggtggaaaaacgggtttttgggtatttcgttgtcggtcggttggtaattttttagcggagggatcgggtcgagttcgcggattttttcgagtgttttttggggtttagtcgttggtattttatttttttcgggttcgg

SEQ ID NO: 11530 - DNA, 922 bp, synthetic construct
  misc_feature 1..922: note = Description of Artificial Sequence: Synthetic polynucleotide
  source 1..922: mol_type = other DNA
cgtgttttttttcgttatttggtacggttcgtgttttcgtcgttgatttggtaggttgcgcgcgtatatttcggtcgggtgcgggtcggcggggtatagcggtttttacggttcgttttcgttagttatttttcggttttttttttcgttgttcgcgtgtttcgggtcggtttagtatttttcgagttacgtgttcgcgtttttcggcggggaggagcgtagtcgcgggggcgcgtttcggtgatttcgttttttagttttttttttttgagttcgggagttcggttcgcgcggttaggtgcgaggagattcgggattttacgttcgttcgttttgtttagcgttttagtttcggcgtgcgaggcgtcgtttttttttttgttttgcgcggtgtatggaggggttcgttcggatcgtagtcgtcgttatcgtagtcgtcgtcgcgcgcgcgcggggggatgatttgggggtggtttttcgagtcggttgtagcgtaggaggtttggaggtttagttagtttcgcggagaggtgcgggggtgggggtttcgtcgtagggtcggagggaggggtggcgcgcgggtattgggtttggggggttttggtttaggggacgggaggtttcggggacgggcgggtcggcgttttttggagggcgtgggggtgtagggttgcgtgcggggtttggatgttgatgtttgttcggcggggagtttcggcgtttcgcgttttcgggggttcggaggtatttcgcgggaggaggcggggtgaggtgttagtgatacgacgaaatttttttttgacgatggttttcgggggtaggtgagatgtcgtagagcggggagttagggcgttcgcgcgtttttttaagggagtcgggtttttggttttttttaatttttatttttgtagagcgttcgcga

SEQ ID NO: 11531 - DNA, 719 bp, synthetic construct
  misc_feature 1..719: note = Description of Artificial Sequence: Synthetic polynucleotide
  source 1..719: mol_type = other DNA
cgttcgaggatgttggaggtgggggtcgtcgttttagttcgggcgtagggttgggggattgggggcggaaatttttcgtagaattgtttcgtttgtttattttaagggaacggagaggattcggtttttcgcgaaaatttggtttagggaaagggatttcggaaagtagtttcgtagggttgtggtagttttatttcgattcgcgttgcgtttacgtgtagggttcgatttttttcgggaggcgcggcgtcggttggggttaggcggtcgaggatttcgcggtttttcgtttcgtttcgtttcgtgggttttcgcgtatcgtcgtcgcgtatttatttttacgggtggagcggggcggggtagtacggtttcgcgcgtagtttcgattcgttaggcgtatcgatcggcggcgtagcgttggcgcgacggttcgattcggtcgggtttttgtttcgggcgcgggttcggtttgggagcgggcgagttcgtttgtaggggaggcggggattcgggttcgggttgggggcggggaaggggttggatacgtttgcgtatacggcggttcgatttttaggagttttcgggaggggtagaaagggcggggtggaggagggggaagggcgggggtgatgtcgcgcggtcgtaggtttgggatggtgttcgcgttttcgagattcggatagaggtaagtaggggcgtcgtgggtgttagagaggcgg

SEQ ID NO: 11532 - DNA, 958 bp, synthetic construct
  misc_feature 1..958: note = Description of Artificial Sequence: Synthetic polynucleotide
  source 1..958: mol_type = other DNA
cggtgtacggggttatatagtcggaaatttttgtcggtttcgggttattttttttttgaaacggtttttttcggagttattttttggaggattttatttcgttcggtgttcgggtttcgtatttattttttttttttcggttcgtttttcgtacggcgtttattttgtttttcgttttttcgttttatcgtcgttttgtttatattgtttttcgtgggcgttttcggtcgtttttttttttcgggtttcggtttgggggtgtttagttcgttcggcgtcggtttaaggtcgcgcgatttcgtacgttttcgagattcgtttcgtcgttcgtcgttcgggtcgtatttatcgcgttcgtaggatttgggggttttcgttttgttcgcgtttcggtatcgtcgtcgtcgtcgtcgttagcggaaatagggggcggggtttgttcgggaatggcgagtttgcggggcggggcggttcgggggcggagcggggaggggcggggcggagcggggaggggcggggcggagaaggatcgtagggttgagcggggcgttagcgttagtgttcggtattgtttcgggttgggttttttgcgttagaggaaggggagttcggggacggggtacggggttcgcgaggtacgggtgttttttcggggtttcggaagttttttttttcgtttcgtcgttcgtatgttcggatcggtcgttttttcgaggtgttatgatttcgttttttttttgcggcgaacgggttttttttcggggtaggggcggggaggttcgggtttggtagtgcgtttttttgggttttgcgtttatacggtatttaagggtttttttggtttaggtttcggttttttttttcgcgttaggttgtttggtttcgttattttatttttatatttacgaattttttttttggtgtttcgggcggattgtgcgagatgttgatagcgcgg

SEQ ID NO: 11533 - DNA, 3843 bp, synthetic construct
  misc_feature 1..3843: note = Description of Artificial Sequence: Synthetic polynucleotide
  source 1..3843: mol_type = other DNA
cgcgcgtggttttcggagaggcgtttattatttgcgtggcgttttttcgcgtcggagtgcggttttgtttttagcgttagtgcgtcgcgcggttcgtcggtttcgtaggattggttatcgttttttatttatgtaatttgcgtgtgcgtgtgcgtgtgtgtgtgtgtttttttttcgttcgttttttttttttgtgtgtaagagagcgagggtgggggacggaggtaggtaggcgagtaggtagggaggggaagaagagaagggaagttattaaatatatatatatatatatatatttatatacgcgcgcgtatatattcgttttaattttttagaagtttcgggattgtagttgttttatgtggggtagtagtgttggtagggacgtcggtcgggagcggtcgggagcgggagtcggtcgtgcgcgcgcggttggaggttcgttggggtttcgtttttcgcgggagttattgttggtttcgttggagttgagcgtagagttcggatttgtttttttttgggcgtttcgttacggttcgcggagtagaggagtcgcgtcgtcgagagagagaggagttatcggcgcggcgttttgtttttttgtcgtcgttttcgtcgttttttcggcggtagtagtttgtagttacggtaaggcggcgtgattcgttttacggaaaagcgttttggggatcgcggcgacgtttcgttagttttatcgttttttgtattgttggttcgggtagggttcgggtagtttacgcggttgtcgagggtttcgggagatgtttgtttgtttttttggtttaggaggagggaggttagggcgcgggtggtcgaagaggtaagttgttttggagtttggagtcgtcgtagttttcggagttcgtcgcggattggagtttgggagtaagggttgggggagggtagggaggtgggaagcgggtgggagggaggcggcgcgttttaggttcgtttgtttttttcggatttcgtttttcgtttcggttcggtcgtttgtagtttttttgtagattagttcgttttaggttttcgtcgggcgttggaggagttcgcgaggcggcgtcgggttttagcggttgtagtttgttttgcggggtaagtgtcggttgtagtagtttcgtacgggcggtggttggagtttagattttggagatgcgattttagtttttcgttttttgtaattcgcggggcgttcgtttttttttatcgggcgttcggtcgcggtattgatgttcgtttaggagttaattgaggttgtagtcgttagatggacgtttggagggttttcgggtgtgagtgtgattgtatgattatttttatttttagtttcgggaaatgtgttttgggttgaaatgtgattatcgagttttttagttattttaattgttatttttaaatgcggtcgttatattggaggagtagattggaaggtagtggggcggtgtgtgtgtgtgtgtgtgtgtgtgtgtgtggatatatatacgtaatcgaggaatatataattaattatttgggtgaagggcggggggtttatttagtgagttttttttggcgggggggtcgggcgagttagttgttcgttgttcgttttttttttgtttgttttcgtttaggcgaggttggaaagtattggaaatttagttgcgtggtttttaattttggaaattggtttcgtttttagggtaaaatgttaaggcgatttatgtattcgcgtttatgtggatgagtgtattattgtttagttgggtgtagagtttttaatagtatcgcgttaagtttttattcgatttttaatttttttttattttttaatcgtggagagagggtttatagaaatgtagttatttgtaaattatcgacgtagtgaaaggggcgtagggaggtagttagagttttgtttgaatttgtatattggtttggtgtttgtagtatacgagattatttcgttgttttgtagaaggcggtggtggggtaagttcgggattttaatcgtcggggtggggggtggggggaagagggtgtttatgtattgagttttgaggtcgagtaaggagagagatttgttgagcggtatcgcgggtaattatataagttgtttcggtgattattcggaattgtgatgcgagttttcggttttcgaaagataagtttgaaagtttgtttgtttggggagtgtaagtatcggggcgtttttatttcggtttgggtagttaggatacgtttcgtattacggcgtttatttgtgcgatgggcgtcgggtgttgatgttgttgtttttaaagaatcggttatcgaggtagggattaagtgggggtattcggaattgatcgtagaggaggagttagttagaattgaggttttattgggtttttagagttttaagttttttttcggaggtgttggaaggttttttagggaacgtcgtttttagaaattgatttggtgttttggggagttttaaagtttttttttttcgttttttttgggcgtttttttttgttttttaagttttgtgttttttacgtgtttagaaatttgttcgcggtgtttggttttttttggagatgtttaggtagtttagttatttaggtttacgttggcgaggggttagagggagtagaacgttggttttgtcgggttgttatttttatttatatttatttttggttttttgcgttagttcggcgttgatggggacgggatggggttggggtcgggtatggttttcgttttttcgtttttcgtttttgtagatagtagtttgtttttgttgcgtttatttttttcgtttcgtcgtttttttttagcgtcgtagtttgtgtattacgttgatgggttttgatagagaaattatagtaagagtatgtttttaaattttgattttcgtttgtagggggataagttattttagttttgatatagtcgtggggaacgttgaagtttgggatatattggttttgaatttttttttttttagttcgtagttaggagatggtgatgtgtatgggtggggagtgttttgtttttgttatattttagcgttttgaaatttttcgtttttttttattgaaattttcgatttgtttgaatttgttttttgttgtaaaataaattttttttttcgtagatttgtggggtttttcggattttttgtcgttgttatgatttttaataatgcgattgaaaagttagtgttcggttggaaaaaaatttttaggtgttagtcggtcgcgttttgattttgttgaaggagtttttaattcggttgttagaggggttttggtttagtcgtgggaatttaggaagaaggagggcgtttcggaggcggttgggttagtttttcgggtagggcgggaattaggtcgcggcggggatcgtagagggggaggggacgggatttcgcggtaatttgtttttcggcgagtcgggttcgcgtattttagttttttcgttttagtttttcgtggttcgtttttttcgtcggtttttagttgttttcgtggtataggagtcggtcgcgattttttcgcgtttttcgtcggagttcgcgggacgtcgttaattttgggtttttcggtggtcggagtagcggtgcgaattagcggggcggtcgggtgggcggggtttgggcgggaaattggagtcgagaagatcgcgttttaggttaagttttagtcgtaagcgtcgcgcggtatagtgtagggtttcggtcgcgtttttttttcgttttcggttcggtcgcgtttttgcggatttatagcgcgtttcgggcgttttgtagttgggtttttagcgggggagtttttttcgttaaagttacga

SEQ ID NO: 11534 - DNA, 384 bp, synthetic construct
  misc_feature 1..384: note = Description of Artificial Sequence: Synthetic polynucleotide
  source 1..384: mol_type = other DNA
cggttggtcgggggacgtgttcgcgttgtttttttttcggtcgttagggggcgtaggaagaagttttggaggtttgtttcgggatcgcgtattcgtttttttttttcgttagttttttttttattttcgttgagtttcgtttcgtcgtttgttttttgcggtattcgttcgtatacgaatttagttcgggaatcgagttgcgggagtgcggtttgtgtcgtttcggttaggagtttgtcgattgtagacgttttgcgaatcggtaagatgtgttttttggggttgtttttttttttatcgtttcggggttaagttattttatatgagtataataacgagttggtgacgggtagtagttatgagagttcgtttttcgattttcgg

SEQ ID NO: 11535 - DNA, 1432 bp, synthetic construct
  misc_feature 1..1432: note = Description of Artificial Sequence: Synthetic polynucleotide
  source 1..1432: mol_type = other DNA
cggacgttagggggtgtttttagttttagcgtagaatttcgtttcgtataatttatcggattagttaggtcgtcgaagggtattaggttttagttattacgacgtttcgttcgacgggtcgtagttatgtaggagtggtagaggttgtttgacgaagttttttttgggggtcgatgttttttttcgggtgggaaggggcgttgtcggtgagggttattttggcgtcggtttgcgtcgttcgaagtcgggggggaggggaggttttcgtttagtaggggttacgttcgtttcggacgggggtcgcgcgggcgtttaggcgacgtattttcgtcggggttcgtgatcgttacgttcggcgggcggcgttgcgttttttttcggggtttcgtttaaggttgtagttcggttcgcgtcgtttttagggcgtttttttcgttcgcgttgggagttcggcggtcgcggtttttttcgttagttttagttgtagtttgtttttgttgttttttttcgttcgttcgttcgttcgcggtttgtagttttcgggttcgtttcgaggtggagggattgtttttttcgggggttgtacgtattcgtagcggtttcggtttttcgtcggatatatatcggtttttgtaggttgtaaagaatagcggcgagaatgtatcggttttttttttttttgttttgagtttcgggtgtggggggaggggaagtcggcgaatagcggcggcggtagcggcggcggcggcggtagcgggcgacgtaagttcggatgtagtttcgggggtttcggcgttgagaaatagtcgattttagtggcgtaggacggatacgaggacggttcgggggattgtgtatcgggtgtgcgagttcgtaagtcgtagtaggggtcgcgcgcgttgggtttttacgcgtttatggtttcgggcggcgcgcgggggttttcggggtcgtagtttcgcgtcgtttggcgcgcgtcggcgtttcgtttggttttaggttcgggtgtcgcgcgtcgcgttttataggcgtcgggttcggttgttcgtttttttcggtcggcgcgcgtagttttttcgcggagtagtcggttaggtagttttgttcgttgtttcgttttggttcgattgataggcgcgagcgtcggtagtagttttcgcgtttcgtttttcgttcgtttttcgcggtttagtttaattagcggcggttgagaggcggttattagggtgacgcggtatcgcgttttgcgaggggcggagtcgggggtcgttacgcgcgtttttcgcggtaaaatttaaaggtcggtagggcggttttttaatttttttttttaagtagggacgaggcggaatttgtttcgcgaggattgtaattttcggtatgttgcgcgtcggcgtcgggtggaggggtttcgattgggggcgtagggcgt

SEQ ID NO: 11536 - DNA, 325 bp, synthetic construct
  misc_feature 1..325: note = Description of Artificial Sequence: Synthetic polynucleotide
  source 1..325: mol_type = other DNA
cgttgtcgtcgttgttttttcggtttttttgttattattttttacgttttgtagttttgttttttgtttacgggttgttaagtcgcggtttggtcggtggtggtagtggcggagttagataaagttttcgtttttttcgttttagagttttttaggcgttttaagtggcgggaaggtcgttagttttttaggtttcgcgttttttgtttggcgtgggggtggggagtcgcgtttggttttaggagttttttggtttttgttaatttttcgtttttgtatattgcgtttattgtttgagatgcgtcgagacggttttcgttgacgt

SEQ ID NO: 11537 - DNA, 1242 bp, synthetic construct
  misc_feature 1..1242: note = Description of Artificial Sequence: Synthetic polynucleotide
  source 1..1242: mol_type = other DNA
cgtttatagataacgttttttcgtcgttggcgttggttcgggatgcggtttcgagatttttgtagtcgcgcgttggtttaggggattttcgtaggacgcgggcgggcgtcggggtcgggtcgggtttgggtagagtgataggtttttagtcgtgagttttataagtagatttatttataatatttcggataggagtttaggtcgcgtcgttcgcgtcgttcgcggggattcggcgtgaatttatacgttttttttttatcgtttcgtcgtttgttacggtttcgagattcggttagttttttcgggggtttttttcgtcgcgtagtatttcgttcgtgagtagttttcgtttgcgtttttttttttttagggcggtcgtttttattttcggtttttatttagcggggatttattagggcgagggttgaagatttcgcgggacgtcgcgcgtcggggatagcgacgtatttatttttttagttatttgggaggttgtaggttcgggtcggagttcgaggtttaggggcgcgcggagtagttttggttaaggcgtagggcgcggggttgtatgggggtttagtttagcgtgtatatcgtgtattttttagcgtagggtttcgcgttttttcgtagttcggtaacggtcgttattttagagtttcgtttattaggagtttcgtttagggtatcgtttattcgggtttcgtttttatcgcggttttcgtcgtggtttcgttttcgtttagagtttcgtttttagcgtatattgcgttagtcggatttgttttgtagttgggttttttggaggtttttatttcgcggttattgaagcggatgagtgtgaggttgattgggggtttggggatgggggatcggagattattaagaatatggttgtgttgggaaatttttttttagagtagagagggagggttttttttcgtcggggtgttttttattttttagtttttttcgcgtgggttcgtattttagttagaggggatacggcggttaggtttgcgttgttgcgtttgagtttaggtcggtagaggtcgtagatttcggttttttagtcggtagggattcgtaggtgcgcgtttttacggacgtttttcggggaagttcgagttcgttttttgtaggtcgggaagtattcgtttcgagacggtcgtattttcgtagcggaagggcgtttgtattatagttgtagtattagcgcgtgcgaggcggggttagggtcgg

SEQ ID NO: 11538 - DNA, 1460 bp, synthetic construct
  misc_feature 1..1460: note = Description of Artificial Sequence: Synthetic polynucleotide
  source 1..1460: mol_type = other DNA
cgcgtttttgttttttttcgatttagtcgtaaatttcgagttttagcggtcgttttttttttttttcgttttttttgatttaaggttttaaaagataaacgtgttatttttcgtttcgtttttggattttggtttcgatcgaatgtagtggggatcgagaagcgtaaggtttaggatttgttagaggggcgcgttaagggcgtttttgtttcgttaggatattatcgtttgggtattttattttattttttcgtagttttttttggggtcgggcggggcggggcggggtaggggggtcgggcgcggtttacgcgttttttcgagtgcgcggtgcgggacgggcgcggttgacgcgttttcgtcggtgtttgtgttttttcgtaggttaggagggtattttgcgttgttattcggatttggcgggtagcgagttgtagcggggtacgtttacggtcgagtcgtagcgggaatagagcggcgtaggtttgaggagtttgggcgcggacgagcggttgcggttggtcgagtttaacgcgtagtatcgcgcgcgtttcggtttttttttcgtgttcgtcgcgcgttttagcgatcggacggcggtgtcgcgcgagttggcgcgtcggttgttttgttcgttcgcgtaggagttgcgtattgttttgggcgaggtgaagaagatcggtagtttgcgtttggtcgatttttttcgcgtagatttcgttaagttgtagttgtcgcgcgggttagggattcgggacgtataatcggacgcgcgggggttacggttcggagttgtgcgttttgggcgggaggcggattcgggtttggaatagcgtttatatacgtgtataaaggaagtggagaattgaggtaattatacgagtaatgagtttttttgttcgtttatttatacgcgtacgcgttgttaaaatatttatattgtttagtgttttgtttcggatttatttagtttattgttttaattttttattttttttgcggttttcgatattatcggtttttgtggattttaaagcgtttatttagttttttttaatttttttttgttaagttcgaattgtaaagtaaaacggacggaaaaggaattttttatgttatagcggtttgtttgtttttttttttttttattttatttgttgcgttcgatttttatatgtgagcggaagcggtgttttcgtttttgggtattaggggagtagattgggagttaggaaagttaaacgttggtttcggttcggtttggggagtcggggaagtcgtaggaaggaggcggtgggtcgggaagagttttgcgaagggaagagttaatcgaagggttgggaaggcgtttcgtggggacggacggaatagttgtagttatcgtttttaaaaggcgggaggcgtttagttaaagatttttttcggaggtcggttttgggggggtggttcgattgtttcgg

SEQ ID NO: 11539 - DNA, 1064 bp, synthetic construct
  misc_feature 1..1064: note = Description of Artificial Sequence: Synthetic polynucleotide
  source 1..1064: mol_type = other DNA
cgattggcggttgtgtggcgatagcgtacgtttagtttttggaaagttttgtagtttattaggagagttttcggggcgtttttttttttggtttttttagggatttgcgggtagtggaggagttttttatagcgaggtagcgcgtttaagtcggataggatgtttacgcggtatttttttgtttcgggttggaaggcgaattttaggtttcgcgcgtttagggtattgttggtttttagtagtttttttacgattagaggtaagtttcgagttataatttttagttgggtgaagattatttttatttttagtattagtggtagtattattgttttttcgggcgcgttatagcgtagttgtagtcggacgcggtttcgagacgggttgcgcgcgtttaggtgagagtagcgtatttcgttagggttaaagtcgtacgggaagcgtttgggatttaggcggttcggtcgttgggttagtgcgtcgttgtttagtatcgaaatcgcgtagcggttttcgggttgtatttgtaatattaggttatgtaggggatttagttagattttacggtcgaaaggtattcggagttcgcggttcgttagtattatggtttttttagtagggatttttgtagttttcgcgagattaggggatagtaacgttttgtcgaaggtagcgggttgtgtcgggacgcggtttattagtgataggagaagtagtagtagtagtagtagtcggggcggcggtggcggttttggttgaaagttggtggagttgtttgttcggcgcgaggataattcgggagtttcggttgagtgtatggtttcggtgttcgggtttggataggttagtttgagagtatgcgaagtcggttttcgggtagataataagagatatcgtcgggaagtgttaggaatttcgcgcgttgttcgcggggtttttttgtagtcggggttgggttagaaggatggtaaagttgcgcggcgtcgttcgggttggagtcgtagtcgaggagtcgaagtttttttaggtcgtttagtttcgtcgttagcgttttaatcgcgcgg

SEQ ID NO: 11540 - DNA, 622 bp, synthetic construct
  misc_feature 1..622: note = Description of Artificial Sequence: Synthetic polynucleotide
  source 1..622: mol_type = other DNA
cggtttgttacgcgttttcgtcggggtttattcgtatttgggtcggggttggtgtttacgcgcgacggttcgggagtacggatttttgtttttcgtagtatcgtttttcgggtggagtcggcggtttcgtttcgtagagttggggttgtatttggggtaacggggtcgggtttggacgttaggtcggaggagtagtatttgttaggagtacgtttcgtcggtaggtcgtaggagttttgggagtcgtcgttatgggtacgttcggcgggtggggggtcggtcgggttaaagattcggagttacgcggggcgggggtcggtatcgagggtcgggaggcgcgaagggtacgcggcggcgggaagcggggcgattcgaaggtttacgggggtcgggaggttgcggggcgttcgggattttttttcgggtggttatcgtgcggtcggggcgcggaagttagaggtgtttagaggcgtcgatttcgtcgaggttgcgattttggttcgttcgttcgtggggtattgtaattttcgtatttttattttgcgggtcgggagtgcgtttggagcgggacgggatttagcgggtgacggtaggggcggtagaaatatcgtttaattggcgg

SEQ ID NO: 11541 - DNA, 1622 bp, synthetic construct
  misc_feature 1..1622: note = Description of Artificial Sequence: Synthetic polynucleotide
  source 1..1622: mol_type = other DNA
cggttttatcgggttgtaagggtcgggaagttgtgtcgggggcgttttagaggttagagttagggagggggttcgcgatataggcgggttttttaggcgggtttagggttaggatagcgcggtattattcggttagttttttgtagttaggatgaaggtcggggatagacgtttagttttagattttttagatagggttgggtagtgtcggtgggtgtttgggagaggcggaggcgggcgtatttttagtattaggttcgggaaggatacggtgtttagtcgttggagtttttggtttgcgtgttttattttgattttttggtatttggtgaacggttttttcgtagggtgggggtagttaggggatttgtcgaggaaagttggggatagcgggtttggtggcgcggttcggcgcggcgcgtgtttggggcgcgtggtcggttatagaattcggggagggtggaggttttcgggtacgcgtcggggtggtgggtagttcgggacggtagcggcgattcgttatttgaggaggggcggggattttatcgcggttaggtcgaggcgtcgagggttttttgcggttttcgttttttttcgttggtttcgacgtcgcgttcgggtcgggattcgagtttcggtttcgcggggtaggtttaggtttgcgcgttgcgtttgtagtcgaggtagaaattcgtttcgaggcgcgggcgtcgggttcgggttttaaggatgcgcgtcgggttttttttcgcggggatagtcgagtttcgtcggcgttttaggtgttttcgtagtgcgttcgggcgcggacgtttttttgttttcggaggggaagcgggagggtttttggggtaacgtttcgatttcgggttttttaatttgggtcgatagtcggttggtatagggaggtttgcgcgggagaggggcggagagagcgtagcgcggggtatagcgggcggttttcgtgtcgcgcgcgcgattggaaacggcgtgtagattttaaaacgagggttttatagagggttacgaggggtaggagagagttttcggagaattttagtttttcgatacggttattttttggtaaacgagcgagaattggggcgtagagttttgggagggtcgttttttcggcgggagcggttcgagtatagttttatagtagatgcgagcgcggcgggcgttttggtgacgaagtagcgggatttgtaggaggtagaggtttggtggggtcgtggacgttacgtcgagttgtttagatttttttagaagatagtggggattatttaacggtttttagtagaaattaagttaggtgttcgttttacggagattgttcggttgtagggtggaggttggatgagaataggcgtttttttaggtaggcgttcgtggtggtaacgttgtttaggaggagggtacgggtttcgggaagatttgcgaggttaaatcggtagtttcggagaattgagcgtaagaggtcggtgatatagagaggagttcgggaggtcgtatgttttaggttgaagttatttggcggggacgtttattgagatgcgaaatataggaagggatagaggttgcgtagagggaaaaggcgatggattcggttttggaaacgt

SEQ ID NO: 11542 - DNA, 324 bp, synthetic construct
  misc_feature 1..324: note = Description of Artificial Sequence: Synthetic polynucleotide
  source 1..324: mol_type = other DNA
cgatttttcgagggaggagatagcgtcgtttttttatttgtataggtgttttcgtcgtaggtttcgtatatttatttatggtatttatataggggttcgaagaatatgttcggtttagttacgtggtagatgtagacgtcgtagtcgtagcggtttcggtcgtggtatagcgcggttttcgggggttgtttaggtgcgcggtagcgtcgtttcgattcggttcgggatagtttgtaggcggcgttcggttagtttttgcgcgggcgataagtaatcggtaggtcgggttagacgcggacgtcgttttttgtttcgaatttacgt

SEQ ID NO: 11543 - DNA, 1881 bp, synthetic construct
  misc_feature 1..1881: note = Description of Artificial Sequence: Synthetic polynucleotide
  source 1..1881: mol_type = other DNA
cgtattcggtttcgaagaaggcgtttttcggataaaatcgaggaatttgttttgttttgtaaggaattagggtttgttgatttttagattttaacgagaatttttgtttttcgtaggcgttttataaatttttattggataattttatcgcgcgttattgggttttcgggagattcgtgatttttattcgttttgggcgcgggttcgtagagttttaattcgcgttttcggtagtcgggatttttcgttcggatcggtttttaggttggaaatattatggttcgtattcggggcgtagtcgagatttatcgcgtcggaggtttcgggattcgtttagatcgttgtttggttattttacgtttttgagttttttatatagttagtttcgtgattttcgagtttcgtgattttcgagtttcgtgatttttaagtttcggaagtcgttgtaggtagcggtttagttaggtttcgttttttttatcggagttttacgcgttaattttagttaggtttcgttttcggtcgttttaggcgtggatttaagttaggtttcgttttttgtttggttattttaggcgtttatcgttttaggcgttttttagtttaagtttaatgttcggttgttttagacgtcgatagttttatgtttcgttttttaatcggttgttgttggcgttttttggtttaggtttcgttttttattcggttgttttaggtattttttaggttagatttcgttatttatcggtcgttttaggcgttcgtagttttaagtttcgtttttcgttcggttgttttaggcggttttcggtttaagtttcgttttttgttcggcggttttagaggttcgcggttttaggtttcgatttttgttcggttgtataaggcgttttttgggttaggtttcgtttttagttcggtcgttttaggtttcgtttcgttttttttgtgcgcgtttcgttcggtagtttgtgggacgcgatcgcggcgttagtttcgtttttttgtgttgcggcggcggtttttcgagtttttttcgacgcgttttttaggttagcgagtttcgcgtttttcggtgacggattatgtcggcggcgggagcgggcgcgggcgtagaggcgggtttttttagcgaggagttgttttcgtttcgtttttcgttgtatcgcgtttgtcgcgacggggatttggttacgttttgttcgttgttgtagtagatattttacgtttatttggtttttgaggattttttttatggttggacgttcgtgtattgggtcgcgtatttcggtaaggtgggtgcgaacgttttaaggcgttatttttttcggttgtttagtgggagtcggggaaagcgggtttgaggtgcgggggacgtggggcgtgtcgggatcgcggggcggaagcgggatcgacggcgtttgtgtttcgaggggtttagggcgtttgtgcggtagcgttcgcggttcggagtcgcggcggggtagtcggggggcgcggggcggaagcgaggtcggtggcgtttgcgttcggaggggtttagggcgtatgtgcggcggcgcgcgtagtaagtttttaataaggcgggttttaagggtttcggcgtttgttggtcggattttgtgcgagcgcgcgcgcgcgcggatggtgcggggttttttaggtcgggtcggaggcgcgagcgatttcgtagagtcgggtattaggtcgcgaagtcgtttaggcggttttcggggagtcgagttggggttagaggcgcgcggggaatgttcgggcgcggtcgattttttggtttcgtatagtttcgttagtagtcgagggtcgcgttgcggacgagtttagtcgaggagtaagcgtttcggcgggattggaaggtttcgg

SEQ ID NO: 11544 - DNA, 944 bp, synthetic construct
  misc_feature 1..944: note = Description of Artificial Sequence: Synthetic polynucleotide
  source 1..944: mol_type = other DNA
cgtttatagggcgtcgcggcggcgttgtagagtttatagtagttcgtgtcgtcgtttcgttcgttagcgttttagcgaggaagtagcgcgtagttcgcggtttagcgtattcgtagtagcgttcgtagttcgttcgcgttatgttttaggcggtcgagcgtttttaggagtgggttatggagggttttcgcgacgggttgaagaaggagcggttattggacgatcgttacgatagcggtttggattttatgaaagacgaggagtacgagtagatggttaaggagttgtaggagattcgtttcgagtcgtaggaggtgtcgcgcggttcggagttttggaagtagtagtttatcgaggacggggattcgtaagtggcggaggttcggggttgggggtcgtcgggagggcgggacgcgcgcggtttgggggtgggaggcgtcgggtttggagttcgagtcgggggattagcgatgtagtcgggcgggcgtcgcggtatttcggggtttttgtatcgtttcgaacgttgtagggttgtagggtcgcgcggggtatcggtttaattcggaggggcggcggttgggttttggtggatggtagcgtcgttatacgttttttttttttagattcgttttttaggtcgggggcggggcggtagcggggacgcgaagttttcggttgtataaggcggggcgggagtttttggtcgttggcgggcgtcgagtagtcgggaggggaagtatagggcgtttcgagttggcgggagggcggggcggtttggtcggcgttcgtcggggtcgcggggggaggggggcggaaagtttttgggcgtttgttaggaatatttagtttataataatttcgcggaaaatatcgcggtttcggtttttagaaatttcggttttgcgtaatttttcgtagttcgcgtttttttgggttttacgcgg

SEQ ID NO: 11545 - DNA, 1514 bp, synthetic construct
  misc_feature 1..1514: note = Description of Artificial Sequence: Synthetic polynucleotide
  source 1..1514: mol_type = other DNA
cggagtcgaattcggtgtttttgttcgtttggggtttcgttagcgcgtcgtaagtttttttagaaatttaaattttgtaggtcgtatttttaattcgtattttatttaggttttcgtttggcgtcgatttgttttagtttaattttcggtttcgtagattaggtatttttcgggacgcggggtagattttgcgttcgggttttttttcgtagtcgggttgttcggtttttgcgcgcgtataataggcggtacggcgtagttttcgggagcgcgggattcgggtgttagtttcggcgtttagttatagcgatatagatttgggtgtcggggttcgttagggagttttgtgattcggggattttcgcgatgtagagaattagggatcgcgtacggagtttaggcgcgtagtttgtagttaggattagtttttcgttttcgtcgttgaagtcgtttcgagttttacgtttttttcgttgtcgggttcggttgttttagggtttcgttcgttcgttttagagtgagcgattttcgatttacggagaagcgattttattatcggtgttcgatatttagagttaagggagcgagaagaaggcgaagaaagaggcggagagcggtgtattgttttcgttgggattcgcgatttttagaaattttttcgaaatttagtttcgtcgtcgtttcgtcggtagggggtatagcgggcgttcggggcgcggcggttgagcgatggggcgagcggaaagggtttagacgtttggtttttgtttatatttcggagaaagttttgagtattaggcgttgggttttttggttatttttttgattttttttatcggcgtcgagtttgttttattttttttagttttttggtttcgttagttagaggggcgtttcgcgttcgtttcgttttttatttacgtttttcgattcgattcgttttttcgaattttcgttttttgagatttcgttttcgattcgttttaattggtcgcggcggtagtcgagtcgcgggagttgcgcgttgagttcgcggtagtacggggagcgttcgttcgtttcgttttggatttaattaagcgtttcgcggaggggtgcggttatttgggggtaggagaaagcggagtacgttatttttttagggatttaggaagcgaggcgagttttaggtggacgcggtggtgtggattacggcgattagggtttttttttttgttgtggagacggaggtgcgaggggacgtcggcggttttttattttttggtcgagtggtttttttcgttttcggttggattttttcggggcgttttttttagagtcgagtcgggttggtcgggggcggttgtttggtttgagtgtcgttttattaaagcggaacgtcggaggggaggttatttcgagagaaggcggttttcggcggaggtggtttcgtgaattttgtagttttttgttcgttcgttattcgagacgtcgcgtttcgtgggttttacgttggatggagggggcgtcgtcga

SEQ ID NO: 11546 - DNA, 2144 bp, synthetic construct
  misc_feature 1..2144: note = Description of Artificial Sequence: Synthetic polynucleotide
  source 1..2144: mol_type = other DNA
cgcgtttggatgcgtttttcggattcggttttatataagttttagtttttcggattttgtatttttttcgcggatttttttatttttttatttttaggtttagatttttttttgtcggaatcgttacgtttttttatttttttattttcgttttattcggtttttttttttttggtttttattcggttaggttgtttcgttttggtagttttcgagggtcgttcgaggttttcgtttattaatcgttttcgtttggaagaatgcgttcgttcgagcgtattttcggcgggtgttaaagtttttcgttttaataggtgtttttgtttggttacgtatagttttgttatttggggttcggacggagacggcgataggatcgttttttgtagggcggttgcggtttcgtacgttttcgttcgggtttttagagcgttaagggttttcgtagtttcgtcgtcgttttcgttgtgttatattgtttttgtttttttgttcgtttagatgtcgcgaggttgattttatgtaagggtatcgttaagttcgggcgttgatattgtttatttattcgtggtggcggattttaaggttgggagtgagagacgcgtatagtgcgagatttttttttaatttagagaatttcggggaagttgggtgttcgcgtcgaagaagcgggtttaagttgattcggtttagaagggggttcgaagttaggcgtagcgtttagagagtttttttttatttacgtttttattcgatgttttttgtttttagaaggttggagaggggttgcgtattgttatttacgcgttcggttgcgagtggtttttatcgttcgttcgtcgcgcgttgggttcggtagtttttcggggtatacgaggttttcgtagtttttagattttcggtttcggtagcgtagagtcgggagagtcgttacgtttttagtcgcgcgcgtacgtcgggtttattaaatttgtagtatttttttttagtttttattttttgttatttttttttagtcggtgcgttttagtttcgtcgttcggtagaggttgttataataacgggtaggaatgttttaatatatataaagtcggttcggcgtagcgggtatttagttttggtcgggtttcgcgttttcggtcgtcgcgtagggtttggacgcgcgtcgcggttttttagtcggtcggtcgacgttcggggcgtatttataatgagcgggatggtgcggttttcgcggagttgtttcgattttttgtttgttttttgcgcgtttcggtcgtcggaggatgttgcgtgggttcggttgttttgttataagtagtagaaagtgtttaggatttaggttacggttaggatggcgatggtattggcgcggattttttttatggtgggtagacgggcgttttaggtgggggattgggtcggcgtgttttcggggtcggggcgggggcgttcgtagttttagttgtttgttttcgttcgcgtttagttgtttagttttgtagagtagaaaaaggagagaggtgggggggcgggggggtgatagggagagataggatcgcggagcgatttttacggttttaatgttttttagtttcgagcgcgcgcgtttttcgggcgtttatttattcgtgcgtagggtcggtttcgcgttttagtcgtcgtcggttgatttattaggttattgcgtattgggagagaagcgcgtcgagtgggaagcggcgcgggtttttttttcgcgttcgggaattcggcgagatagacgttcgcggcggaatggcgattggttaaagttagtttcggtttttatcgttaggtgatcgaacgttcggtagttgttttcgcgcggttttggtcggttttgtcgatttatatttattttcggatcgagcggttttgagttatcgattggagacgcgcgattttcgatttgggttcgcgtcgcgagttgtagtttcgggttgcgttttggcgcgggatttaaggtgtgttcggcgagtttttgtgtaggggcggttgggcgggggagagttttgagtttgtattggaatttgtagttgagattagttagatcgggttcgtttagaggagggattggaagttggtgtatttgatattcgaagagcgcgaaggggaaacgacgt

SEQ ID NO: 11547 - DNA, 379 bp, synthetic construct
  misc_feature 1..379: note = Description of Artificial Sequence: Synthetic polynucleotide
  source 1..379: mol_type = other DNA
cggtgcgggttcgtttttttttagtttagtttttttgatatcgttttttttttggggacgttgtttgcgggttcgcgcgttttcgttttcgatttttttgtaggttttttcgggggtcggggtaggatcgtatttatcgaggattcgggcgttggagttagtagtagcggtacgagtaggagtagtcgtattttagtttgcgggagacgtattgggttagagcggttcggggttttcgtagttgttttgggcgcgggcgagagtgtgtgggcgcgtttttttttatggtttataggtgattaggagattcgtaataggatagtcgggtgcgtttcggtgtatcgtagagaatatagcgtgagggcgtttcgtcgggcgg

SEQ ID NO: 11548 - DNA, 637 bp, synthetic construct
  misc_feature 1..637: note = Description of Artificial Sequence: Synthetic polynucleotide
  source 1..637: mol_type = other DNA
cgtcgttttatttttaataagtcgaagtttttgaaggaggttcggtgttatttcggtgtgatcgcgtttcggcgacgttgggtagggtgtagggagttagttcggtcgcggtttagcgggaggggagggggtcggtttcgaattcgggcgttcgggtcgcgggtgatttattgggaacgttaggttcgcgcgtttagatcggcgggcgacgtttagcgcgttttacgtttttcgttcgggtcgttcgcgtagaagtagttttcgcgtatttttgtttttcgagacggattcgtcgggaaggagtttggagtcgggcggtcggcgggtagtaatttttttttttttagttattatggtcggtgcgattttttattcgcgttcgtagacggattttttggaaagtatcgggttgggtttatttgattggcgttcgtaggggtcgtcgatttttttatagatttacggaaattgtcggtcgtaagtcgaggttcggtttttagtattcgtcggttcgttcgcgtcggttttttaaagagttgttagatttattcgttagtagtttttttattcgatcgttttgtaggtgcggtgggtttttttttcgttttcgacgcgcgtgcgtattttcgtgtcgcgg

SEQ ID NO: 11549 - DNA, 959 bp, synthetic construct
  misc_feature 1..959: note = Description of Artificial Sequence: Synthetic polynucleotide
  source 1..959: mol_type = other DNA
cgggagtggggcgggtaggaacgagggtttgagtttaggatcgtaattttcgtgaggggttcgaggattttagtttaacgtttcgtcgggtttcgtttttatttttttttttatggcgagttcgtcgaggtttcgtcgtttcgttattcgtttttagcgtcgcgcgggttttgttatcgcgtttacgttcggttaggcggcgatttttcgcgttttgtttcgtcggttgtcgggggtttaagaaatttcgggggggcggggtcgggggcggggtgaggttttcgggggtcggggcggggtcggggagggggcggtggggtcgggggttcggtttagggcgggaaatgggtggggaggggcggggtttgggttggagattggacggaggagtcgggcggagatgtaattggaggaagagggcgggacggggcggagaaggtttttcgtatcggcggagggagagggattaggagggggttgcggcgggggaggagagggggttttcggtttagagattgaggcgagggtggcgggagcggcgcgtaggtagggttggggtggggcgtatatagtgagcgttgggggcgttggcggtggagtttttgaggtttttcgaattagtgggttggggttgcgagatcgagtcgagttgttttgggcggttagagatgtgggtatatagaggttttttttttttttttttcgacgtcgggtagtgggcggtggtttggttttttttttggaatttttgggcggggtcgggtttggagtttgggtttttgttcggagggtggtgttataggaagagttggagttgagagtcgggatttcggggtttttttagggggcggttcgtttttggtttttaggggtttttaagcgtagtgtttttttgttttttttgggtatcgtttaatttttttcgtatttgagggtcgattattttttcgatttcgcgg

SEQ ID NO: 11550 - DNA, 826 bp, synthetic construct
  misc_feature 1..826: note = Description of Artificial Sequence: Synthetic polynucleotide
  source 1..826: mol_type = other DNA
cgtttatttttgcggcgtcgtgaaagaaggcgtaggaggagggagttttgatattttttttcgggttggggttttatagcggcgaaaagacggagggagtgatcgggggtcgcggggattttttcgggacgggttttcgtcggaggagtttcggaaagtcgttttttattttcgaggtttcgtttgcgcgggcgttttattagcggtcggggtggtggcggcggcggcggcggcggcggcggcgcggggcggggcgtcgcgatttttgttttttttttgggtcgagcggtaggcgcgttcgtatcgttttcgttttttcgtcgtagtcgttgtcgatcggttggttgggttttgcggcgtgaggatttcggcggcgtcgtagtttcgcgagttatggtttagttcggcggggaggttcggttcgggtttaagacggcggtgtagattcgcgtcgttatttaggaggtcgaggacgtggacgagttggaggacgaggaggagggggcggagattcggggcgtcggggattcggttcggtattttagtttcggttggggtagcgcgagcgaggaggagtcgagtcgcgggtataggtaggcgcggcggttggttcgggaggtgggtttcgagggggcgtcgggtcgcgcgcgagttcggggcgttgattgcgcgcgataatttttcgggtagagggggttgagttagtttcgtcgtcggggaagtagtttcgggtcgagtttttgagttagaatcggttcgtggaggtagtcggtgttttagttcgtagtttcgtcgtttaatcgaggtttttagggttggcggtcgg

SEQ ID NO: 11551 - DNA, 2156 bp, synthetic construct
  misc_feature 1..2156: note = Description of Artificial Sequence: Synthetic polynucleotide
  source 1..2156: mol_type = other DNA
cgttcgaggaatcggtttaatcgtttttcgttgtagtcggtttgtttttttttcggaattatcgagggagaggcgcgtgcggaggtcggcgttcggatttcgtattcgttattgttgtcggcgtattttttcgaagttttatttcgaagggttgggttttattcgcgcgttttgtgcgtgtttttttgtttttttacgttttttttgtttggttgttgcgaggttttgtaggggaaagattggcgcggggttcgtattttgtttatgttataggaaaatcgtgggagttttttcgacgcggcgtattttcggaagttttttttttaggagggttgcgggaaggtcgggattttgtatttagacgaattcggtcgttttttaagaggaaagtcggagatttagttgaggggtaaaaatgttagggaaaggcgagtttagagtttggtgatggagaaattgggaagttattttttattttttaattttaggatggggaattcgtaattgaagtcggagttttagatttggggcgtatttttagtttagtttaggaaagagatttaagggcgtagtagtgtggatattttttatttcggtttcgaaggtttagcgagggtttaatttgggttttttgttaggttcgtttttcgtttttttttagttttcggttcgtgcgtcgttgtttttttaagaagtttaggtaggtaggttcggttgttggagtcgtttttatggtaattcgcgagttgcggcggttttatgaatatttcggggcgcgggagttcgagcgttgtcggagggcgtttcgggggaggcggtcgttgatgtaagttcggcgggtcgttgggtttcgttcggttgcggcgggagtttcgggacgggtcggacgggtcggggtagaggaggcgaggcgagttcgcgggtggttagttataaagttcgggcggcgagatagacggatagttagttttttcgcgggacgtacgttcgggattcgcgcgggtcgtgcgttttgtatttcggagcggttttttgagcgtcgcggtcgtagagttttttcggtcggcgtttattgtttttcgcgggggcggggcgtttggagtcgggcggcgcgtcgcgtttttgaacgttagagggagggagggaggtaagaagggagcgcggggttttcgcgtttagtcgggttcgggaggaggtgtagcgcggcgagttcggggattcggagcgggattaggatttttttcgcggcgcgtagtttgtttaagtatgggcgtttgaggttgtttttacgtcggcggtaaaggacgcgtttttacgggcggattgatcggcgggcggatttggagttcgttcgcggcgtcgcgtttttgttttcggttcggttcgatttcggtttttggcgttatggataagttgtcgtcgtttatgcgtaagcggttttatagtttttcgtagtaggtgggggttaaggcgtggattatggacgaggaagaggacgtcgaggaggagggggtcgggggtcgttaagattttagtcgtaggagtattcggttgcggttattgttttcgttttttttttcggcggtcgcgggtggtacggagtttcggagttcggttttcggggtagcggatagcgaagggtcggttcgcggcgcgggtaagtttagtacgaacggcgattgtaggcgttttcgcgggagtttggtttcgttgggtagtcggggcggcggtagcggcggtacggggagcggtagtagttacggatatttgtatgatttcgcggaggagcggcggtttatcgtcgagggcgacgcgtttttcggcgaggataggacgtttttaggtttggcggtcgagttcgagcgtttcggcgtttcggcgtagttcgtagtttcgtcgtcgtcgttttagtagttatcgtagtcggttttcgttttttgcgagtagttttcggtggatatcgttattaaagtggagggaggcgcggttgtcggcgattagattttttcggaggtcgaggtgcgtttgggttaggtcggttttatgtagcgttagttcggggttatgttttaattcggggttaataaattttttttaaggatgttcggtagttagaaagtcgtggagcgcgaataggagagggttaagtcggtcgg

SEQ ID NO: 11552 - DNA, 1441 bp, synthetic construct
  misc_feature 1..1441: note = Description of Artificial Sequence: Synthetic polynucleotide
  source 1..1441: mol_type = other DNA
cgtaaggaggaaaacgtggaatcgaatatagtagttgcgggatcgtattacgtgatttttttttcgcggtcgttttatagaatttgtgggaaggggggggagggggagtgtcgtcgtaatttcgaggataggttagtagttcgcgggttcgattttagtcggcgttttcggggttattatattttttcgtcggcggggaaattatattttttatacgttcgaagtcgtcgttttttcgatacggttcgttcggtcgtacgtatacgttacgggtcggcgtttttcggtatacgcgcgaaggtcgggtttcgtttcgttttttatcgatttcgcggagcggcgattatcggttttaattagtttcggatttcgggcgcgttcgggtcggtttttttttcggtttagttttcgttaatcgggggatttatttcgttgaattcgtttattcgggagggcgcgttttcgttttattgttttatattcgagggtaatagcggtcgtatcgtttatttgggtcggggggtttttttttcgttttcggtcgattgagtcgggttggggttttcgaggaagcgcgggtcgtcgggcggttggaagtgggggaaggagaggagggggagggggtcgggatatcgggagtcgttttttttttttttcgtcgattgcggttttcgtaggttggtcgggcgttttcgtatattcgtttagttttttatagtttcgcgtttcgttagttttttttttattttatttttatatatttttatttttatatatttatattcggtcgtttttcgtttttttattcgtttgtcgcgcgcgcgcgcgatttcgtttatatatagcgcgcgcgacgtcggcggagatcgtttcgtttttttagatcgaacgtcgttcgttcgtttgttgaggagcggcgcgcgtttcggtttcgtttttttggcgtcgcggcgcggcgggcggggggcggcggtcggaggagttgggggtcgggttagcgcgtcgagtattgtcgagcggatttgatatttgcgtcgagagtcgtttttttagtttttcgttcgtattcgagttatcgttggtttcgggggaagagaggcgatggatcgcgcgcggggagcgaaaagggagcgcgagggcgtttcgaggacgcgtttttttattcgtttttaaatcgtttttattgagaaagggaaacggatggggggggtggggggcgaggtttgtttttaattcgaaatcgcgagattagtttttttcgttgtacgtttttttcgtttttatattttttgtttaggttttattaatttgcgtttggaatttcgatacgagttttttattttttcgggcgtagggttttgtcggtatttcgacgtttttcgtttagttttttcgtcggtcgtcgttcggagttttcgtttacggtggttttttttttcgg

SEQ ID NO: 11553 - DNA, 734 bp, synthetic construct
  misc_feature 1..734: note = Description of Artificial Sequence: Synthetic polynucleotide
  source 1..734: mol_type = other DNA
cgggtttcgttcgttttgtttgcgggtcgatttcgcgacgtcgatcggttcgcgttttcgttttcgagcgtttcggcgggcggagttgcgggtgaggggggggttggtttggggggcgggggtttcgatgacggtatcggagcgcgtcgtattggggatggaaatttgattgtttggttcgggacggcgtttgtagttaggtaggtgagtgtgggtcggagagcgggttaggggcgaggatcgggtgggtggagggaggcgcgcgtttttttttcgcgtaggtttgggtttagtggttttgggagtcggtatttttgggagatttgattcggtatgaggagttcggtatttttgttttttagttttttggaagtttttttttggattggtcggcgtcgttttttcgatatttgggggttgaggtcggtatttcgggtttgcgtggaggggcgagcgttaaggttgcgagagtcgggtttcgatttgtaattattttttttaatttttatggagtttcgtttcgcgttcgtcgtttttagttttagttgttttgtttcggtttcgaatagcgtttgcggggttgttagagtattttcggagcgggagcgttgtgcggagagtaggggcgcgcggaagtcgggattgtatcgggttcggaacgtttacgcggaggggtgcgcgaaggtttatacggtattgcgaggtagagtttatcgttgtgtgtttagggtcgg

SEQ ID NO: 11554 - DNA, 935 bp, synthetic construct
  misc_feature 1..935: note = Description of Artificial Sequence: Synthetic polynucleotide
  source 1..935: mol_type = other DNA
cggcggtgtttagggggagagggttttagcgtcgtcgttttttaagtcgattcgttcgtatttggttttttttttatagggttggagtttggatgaagttttttatttttgttagattttagtcggggggtcggcgtcgcgaggtttttatgcgcgtttttaaagttgtcgcgggggaggggttatttttcgttcggggttgagattagtcgagtttttcgtttttgttcggttcgtttatttcgggcgtatagcgttagtcggagtagttttagtagttgcgtttttagttcgtacgcgtttaggtttagtatggcggcgcgcggttcgggcgtcgcggagtcgtcgaggagtcgtcgttcgtttcgtcgtcgtttcgttcggcgtttagtttcggcgcgattgcggtgagtttatttcggtcgggagcgtttttcgcgtttagtcgcgttcggtagagagtttttagtcgtttcggatttcgcgtagtttcgtagagacgcgcgtgtcgttcgtacgggtcggtattcgggtcgttttcgtcggcgtgttaggatttcgtatagaagcgttcggacgcggacgtacgtagtcgcggttacgattttcgtcgttcgttcggttcgtgttcggttttggttagtagggttgttttatttttacggcgcggcgggagttcgagggggttttttgggaaattttttgcggggcgtcgtggcgtaggtgcgtttttatttttagggttttattattcgcggttatatttggggtcggatcgcgcgttttttttttttttttcgtttttgagggagtttttgtttgggtcgagggggatttcgggggtttgtttagttttggggtgaggggttggtttaatattttataggtttacggttattagtagggcgggattatagtgggcgcgggtcgtacgt

SEQ ID NO: 11555 - DNA, 1054 bp, synthetic construct
  misc_feature 1..1054: note = Description of Artificial Sequence: Synthetic polynucleotide
  source 1..1054: mol_type = other DNA
cggggtgggggatattcgggttgagttagttaagtcgggagtgtgaggagtagcgggggtcggtaggaacgtggacgcgagattggggagtagtggggttgtttgtgcggggatgtagtttttattaagtatacgggtcgagggttgattataggtagagtagcgttttttggtagcgttgcgggtgtggatgagggaagttaggtttcggatttatatttagacggtcgttttttagtttgtttttttttttttgtgggtttttaaagtgcggtttggtttttttatttcgattttgaggtttggaggtggggacgggattgtgggcgtcggtaaacgtgagttttcgagcggggcgggaaaggagtttcgcgaatgttttttttagtttcggcgttttacgtgtaggtttatgattgggagcgtttttaatttaaatcggtattgcgtcgggattattttttttttggcgtcgttttcgtcgtttttttcggatttttttcggttttttttttatttttcgttttcggggtttttttttgttgagcgggggttgtcgggatttgggattgcggggttgtttcgatttcgtagtcgttcgcggtggaagttagttcgggtttggttttgagcgcgcggttggggcggtcgttgtttatggtgttggcgcgggtggcgcgtcggtcggcggggtttgcggaggtttaggcgtttttggcggggaaggcggcgttttcgggtttggggagcgagggttttcgttttaggggtacggaggatatttagattggggcgttcgtgggtttggtgttgtcgtttcgggcgtcggtattttgcgatatttttttttttcggttttgggagggaatcgaggtagtttcgcgttaggttttttcggatatttggggtaaattcgttttttagagtttcgtgttttttttttaaatttgaggtagcgatttttttatttttaagggcggtcgtgaggtcgaattatgtgtcgattttagtcggtttttgtaaacgttgtgatgtcggttttcggaggtcgcgt

SEQ ID NO: 11556 - DNA, 1474 bp, synthetic construct
  misc_feature 1..1474: note = Description of Artificial Sequence: Synthetic polynucleotide
  source 1..1474: mol_type = other DNA
cgttagcgtcgatgttgttgttttttcgttttttttatttttatatatttttattcgggttttcgcgggtttttcgaattaagtttttagtttagtttttttaaatagtttatatagcgatacgggtattgggtaattgtaattagttttaatcggaagtatttgtttgtgggtgagatttatttgattttcggggtcggtcgttataagggcgagggttgaggatttttcgtgggggatatgggttttttattagtcggaaagttttagcgatcggttgggcgtttttgggtcggattcgcgtcgtcgttcgcgtattggggttttcgaggtgtgatgttatttgttcgtagaatcggtttttttcgcgtcgtttttttcgcgtttttattttagtttttttttcgtcgttttcggggttaatatggtagcggcgtcgtcgttttattttcgtaatcgtacgattcggttggtagggtcgtcggttcggattttcgagatttatatttcggttaggttcgtacgttttgcgtttcggattttcggcggtttttcgtagttttcggggcgtcgattttcgttcgttgttatacgaggttcgggcgttttcgatagttcgggattacgttagagtgacgttatatatcggatttcggcgagttgcgggtatgagtaacgcgcgcgttttcgttttcgagtttttttcgtcgtcgcgtttatcgttgaagattatggcggtcgaggcgtttatgacggcgaaaaacgaagtatattcggggtcgtttttggattcggatatgtttgcgggtggggagggggtaagttttgtgggtcgaggcggtggcggaggcgggggcgaggacgggtcgggtacgaaggtttgcgggcgggcggcggcgaaggcgattcggttcgttagtcgttgcgttttaaatattagtatcgtagaataaaatggcggtcgcggtcgcgttatatgatttgggtttcgtttttgcgagtcgtattatttcgtatcgtgggggagacgcgttttcgggacgttcggtcggttcgttgatttttttcgggttgtgtcgttcgtttagcgattcggtttcggcgttcggtttcgttttgtttcggttttcgcgggtgttttcgggcgtcgtcggtttttggattttcgtagcgttggatcggtttcgcgtcggggcggggcggtgtggtgtgtgttttattagtatacggggcggggtttcggacgtttcgttttttttgcggttgcgcgtcgtttgtaggtgttgggttttcggcgacgtttttttttgtatttttggcgtgaagttgtaggtcgtggtttcgcggttttgtttttaagacggggttttattttttcgggcgttggttttttaggatttttttattaattttgggcgagttaagggttttagtagatgtgcggcgcgcgggttttttttgttatagcgttcgg

SEQ ID NO: 11557 - DNA, 357 bp, synthetic construct
  misc_feature 1..357: note = Description of Artificial Sequence: Synthetic polynucleotide
  source 1..357: mol_type = other DNA
cgggagatttcgagattttcggtcggtgatagtaggcgattttttgtttttgttaatttgtgggtttttacggacgtggggaagggaggagggaggttttagttttttgcgggggaggggcgtgaagacgcgcgggggtggggggagatgagtcggcgtcgttatgataacgaggtcggtggttcggttttggggattcgggagggagggaggcgtcgtggtcgcgcgcgcgggcgggggcggggggttaggttttttaggagtagttggggaatattcggcgattttggcggttgttttttggtggcgtagggagttcgcgtgtttgcgagtgcgtgtgtgtgcgaagtttttcgg

SEQ ID NO: 11558 - DNA, 814 bp, synthetic construct
  misc_feature 1..814: note = Description of Artificial Sequence: Synthetic polynucleotide
  source 1..814: mol_type = other DNA
cgtcgtttaagagtttggggtcgtggggggcggggttgtttgttatcggtttcgtttcgtcgataggattcgtttttttttttaggttcggcggggtcgatttcgtttttcgtttttagtttgtcgtacgatagcggcggcgcggcgggcggagtcgggaggcggggaagtagtggtcgtgtgagcgtgaggagttgtcgttatcgtttgtttttcgtttttttcgtttttcggggttttagcgtcgtgggtcgcgtacggttttggaagagacgtcgtttcgtttttattcgttttttttatcgcgtcgttttttcgttttgttttgcgggtttaggcggaattcggaacggtcgtttttttttttcgtttttcgtcgtcgttttttttttttttttttcggttttttttttagtttcgggtcggagcggggtgtcggcggcggtcggttcgggcggcggcgtttggttatgtcgtgtcggggaaggtaatgagtcgtagagtttcggggtttcggttgagtagcggcggtattaattattcgcggagttggaatgattggtaatttaggtgggtgatcggttcgggatttcgtttcgatttttcgggtttcgtttcgggcgggtcgaggtttagggtcgcggggttgggaggcgcggtttaggttttttatttatcggagtcgggcgcggttttttgggttttttttttttcggttaggggaggaaggtcgcggggaggcgaggtttaagtgttttttttttttttgtttgtttagttcggggttgaagtcgagtttcggggttttcggcgg

SEQ ID NO: 11559 - DNA, 847 bp, synthetic construct
  misc_feature 1..847: note = Description of Artificial Sequence: Synthetic polynucleotide
  source 1..847: mol_type = other DNA
cgtggtgagatatcgatttcgtagagtagagggggcggcggtagaggggaagggttttcgtatttattttttttgtaggaggtgtatttgtatttttcgtatttgtaggagttcgcgtaggtgtaggagttatttagagagggcgacgttataggaagggttaatgtggacgaattcgggtttttacgtttgttacgaggagatggggtgttaagtttttttgtttttcgcgatataggtatgttcgttttttacgaggtgaagaatagggaattaggggttttttttttaagtgtttttgagcgaaggcgtagggcgtgggtttttttgtaggtataagggcgcgtagtgcgtaggatgcgagcgggggcgggggtttattagaagggtaggggtaggttttagggtttatgtcgaggagagtagtagttggaggcggtgaacgggtttttttaagtaattggacgcgcggtttggttagtggtagtaggtggcgatgtttttatagtttcgggcgggggcgcgtatgttaagttcgttgggcgttcgtttttgcgtatcgcgttcgtttttttcgtttgtgcgtttgggtttcggcgtacgtattgtatttgtcgttcgtttttgtcgtgtgtgtgtattgtcggggttcgttcgtttacgttcgcgcgtgcgtttttatttttatttcgtattcgcgtgtacgatttattcgtcgtcgttgtgcgcgtattgttagtttatttttcgcgtgggtttcgtaggggacgtgttcgtcgtagtagtcgttattgcgtggaagcgcgtacgtattattttcgaaagtggagaaaaaggcgttttgcgt

SEQ ID NO: 11560 - DNA, 589 bp, synthetic construct
  misc_feature 1..589: note = Description of Artificial Sequence: Synthetic polynucleotide
  source 1..589: mol_type = other DNA
cgtgggtgtttcggaggaaacggtcgtagttttaaattttttagtttttttagtagggagttttttcgcggagtttcgtttggcggtcggaagttattttaagtcgtttattcggaagtcgtcgttttggtaattgggtatcgttttattttttttttttagtaacgtttatcgttttagacgtttgaggttagtcgagtttcgattggtttttttgttttttattttgggagacgtttgagatttagcgtttttagatttcgtatttgaatttgtggcgtttggtgttcgcgagttgtcgaatgaagttgagcgttttagtggaattagggattttaggggtgagcgatcgcgaggggagagcgacgaaaagggcggtcggagttggaggggcgcggagttaaataaaaaagggcggtcggagttgtaggggcgtcgagttaaatacgttatttttagatggggggttttaggcgagttgtttagtttttttgaggtaggtttttcgtttgttcgttttttcgtagtttttgagttttttttttacgtcgtttttcggtagttttagagacgttacgtttgttttcgt

SEQ ID NO: 11561 - DNA, 20 bp, Homo sapiens
  source 1..20: mol_type = unassigned DNA
cgtggtgcgcgcggcgggcg

SEQ ID NO: 11562 - DNA, 116 bp, Homo sapiens; identical to SEQ ID NO: 8448
  source 1..116: mol_type = unassigned DNA

SEQ ID NO: 11563 - DNA, 44 bp, Homo sapiens; identical to SEQ ID NO: 8459
  source 1..44: mol_type = unassigned DNA

SEQ ID NO: 11564 - DNA, 34 bp, Homo sapiens; identical to SEQ ID NO: 8470
  source 1..34: mol_type = unassigned DNA

SEQ ID NO: 11565 - DNA, 211 bp, Homo sapiens; identical to SEQ ID NO: 8481
  source 1..211: mol_type = unassigned DNA

SEQ ID NO: 11566 - DNA, 95 bp, Homo sapiens; identical to SEQ ID NO: 8492
  source 1..95: mol_type = unassigned DNA

SEQ ID NO: 11567 - DNA, 264 bp, Homo sapiens; identical to SEQ ID NO: 8503
  source 1..264: mol_type = unassigned DNA

SEQ ID NO: 11568 - DNA, 59 bp, Homo sapiens; identical to SEQ ID NO: 8514
  source 1..59: mol_type = unassigned DNA

SEQ ID NO: 11569 - skipped

SEQ ID NO: 11570 - DNA, 324 bp, Homo sapiens; identical to SEQ ID NO: 8536
  source 1..324: mol_type = unassigned DNA

SEQ ID NO: 11571 - DNA, 102 bp, Homo sapiens; identical to SEQ ID NO: 8544
  source 1..102: mol_type = unassigned DNA

SEQ ID NO: 11572 - DNA, 24 bp, Homo sapiens
  source 1..24: mol_type = unassigned DNA
cgcaacgactcgctgccgcccacg

SEQ ID NO: 11573 - DNA, 521 bp, Homo sapiens; identical to SEQ ID NO: 8546
  source 1..521: mol_type = unassigned DNA

SEQ ID NO: 11574 - DNA, 1484 bp, Homo sapiens; identical to SEQ ID NO: 8547
  source 1..1484: mol_type = unassigned DNA

SEQ ID NO: 11575 - DNA, 34 bp, Homo sapiens; identical to SEQ ID NO: 8548
  source 1..34: mol_type = unassigned DNA

SEQ ID NO: 11576 - DNA, 14 bp, Homo sapiens
  source 1..14: mol_type = unassigned DNA
cggcgaggggctcg

SEQ ID NO: 11577 - DNA, 37 bp, Homo sapiens; identical to SEQ ID NO: 8550
  source 1..37: mol_type = unassigned DNA

SEQ ID NO: 11578 - DNA, 34 bp, Homo sapiens; identical to SEQ ID NO: 8551
  source 1..34: mol_type = unassigned DNA

SEQ ID NO: 11579 - DNA, 538 bp, Homo sapiens; identical to SEQ ID NO: 8552
  source 1..538: mol_type = unassigned DNA

SEQ ID NO: 11580 - DNA, 109 bp, Homo sapiens; identical to SEQ ID NO: 8553
  source 1..109: mol_type = unassigned DNA

SEQ ID NO: 11581 - DNA, 901 bp, Homo sapiens; identical to SEQ ID NO: 8554
  source 1..901: mol_type = unassigned DNA

SEQ ID NO: 11582 - DNA, 15 bp, Homo sapiens
  source 1..15: mol_type = unassigned DNA
cgggcggcgcgggcg

SEQ ID NO: 11583 - DNA, 383 bp, Homo sapiens; identical to SEQ ID NO: 8556
  source 1..383: mol_type = unassigned DNA

SEQ ID NO: 11584 - skipped

SEQ ID NO: 11585 - DNA, 624 bp, Homo sapiens; identical to SEQ ID NO: 8558
  source 1..624: mol_type = unassigned DNA

SEQ ID NO: 11586 - DNA, 94 bp, Homo sapiens; identical to SEQ ID NO: 8559
  source 1..94: mol_type = unassigned DNA

SEQ ID NO: 11587 - DNA, 63 bp, Homo sapiens; identical to SEQ ID NO: 8560
  source 1..63: mol_type = unassigned DNA

SEQ ID NO: 11588 - DNA, 41 bp, Homo sapiens; identical to SEQ ID NO: 8561
  source 1..41: mol_type = unassigned DNA

SEQ ID NO: 11589 - DNA, 1041 bp, Homo sapiens; identical to SEQ ID NO: 8562
  source 1..1041: mol_type = unassigned DNA

SEQ ID NO: 11590 - DNA, 23 bp, Homo sapiens
  source 1..23: mol_type = unassigned DNA
cgccttcggctcgggccatggcg

SEQ ID NO: 11591 - DNA, 515 bp, Homo sapiens; identical to SEQ ID NO: 8564
  source 1..515: mol_type = unassigned DNA

SEQ ID NO: 11592 - DNA, 1017 bp, Homo sapiens; identical to SEQ ID NO: 8565
  source 1..1017: mol_type = unassigned DNA

SEQ ID NO: 11593 - skipped

SEQ ID NO: 11594 - DNA, 54 bp, Homo sapiens; identical to SEQ ID NO: 8567
  source 1..54: mol_type = unassigned DNA

SEQ ID NO: 11595 - DNA, 10 bp, Homo sapiens
  source 1..10: mol_type = unassigned DNA
cgcgttgtcg

SEQ ID NO: 11596 - DNA, 26 bp, Homo sapiens
  source 1..26: mol_type = unassigned DNA
cgggcaggttcgaccaggcggccgcg

SEQ ID NO: 11597 - DNA, 934 bp, Homo sapiens; identical to SEQ ID NO: 8570
  source 1..934: mol_type = unassigned DNA

SEQ ID NO: 11598 - DNA, 279 bp, Homo sapiens; identical to SEQ ID NO: 8571
  source 1..279: mol_type = unassigned DNA

SEQ ID NO: 11599-11600 - skipped (2 entries)

SEQ ID NO: 11601 - DNA, 11 bp, Homo sapiens
  source 1..11: mol_type = unassigned DNA
cgagcgcatcg

SEQ ID NO: 11602 - DNA, 30 bp, Homo sapiens; identical to SEQ ID NO: 8575
  source 1..30: mol_type = unassigned DNA

SEQ ID NO: 11603 - DNA, 10 bp, Homo sapiens
  source 1..10: mol_type = unassigned DNA
cgctcccgcg

SEQ ID NO: 11604 - DNA, 56 bp, Homo sapiens; identical to SEQ ID NO: 8577
  source 1..56: mol_type = unassigned DNA

SEQ ID NO: 11605 - DNA, 98 bp, Homo sapiens; identical to SEQ ID NO: 8578
  source 1..98: mol_type = unassigned DNA

SEQ ID NO: 11606 - DNA, 33 bp, Homo sapiens; identical to SEQ ID NO: 8579
  source 1..33: mol_type = unassigned DNA

SEQ ID NO: 11607 - DNA, 48 bp, Homo sapiens; identical to SEQ ID NO: 8580
  source 1..48: mol_type = unassigned DNA

SEQ ID NO: 11608 - DNA, 42 bp, Homo sapiens; identical to SEQ ID NO: 8589
  source 1..42: mol_type = unassigned DNA

SEQ ID NO: 11609 - DNA, 40 bp, Homo sapiens; identical to SEQ ID NO: 8600
  source 1..40: mol_type = unassigned DNA

SEQ ID NO: 11610 - skipped

SEQ ID NO: 11611 - DNA, 42 bp, Homo sapiens; identical to SEQ ID NO: 8622
  source 1..42: mol_type = unassigned DNA

SEQ ID NO: 11612 - DNA, 20 bp, Homo sapiens
  source 1..20: mol_type = unassigned DNA
cgcccgccgcgcgcaccacg

SEQ ID NO: 11613 - DNA, 116 bp, Homo sapiens; identical to SEQ ID NO: 8634
  source 1..116: mol_type = unassigned DNA

SEQ ID NO: 11614 - DNA, 44 bp, Homo sapiens; identical to SEQ ID NO: 8645
  source 1..44: mol_type = unassigned DNA

SEQ ID NO: 11615 - DNA, 34 bp, Homo sapiens; identical to SEQ ID NO: 8656
  source 1..34: mol_type = unassigned DNA

SEQ ID NO: 11616 - DNA, 211 bp, Homo sapiens; identical to SEQ ID NO: 8667
  source 1..211: mol_type = unassigned DNA

SEQ ID NO: 11617 - DNA, 95 bp, Homo sapiens; identical to SEQ ID NO: 8678
  source 1..95: mol_type = unassigned DNA

SEQ ID NO: 11618 - DNA, 264 bp, Homo sapiens; identical to SEQ ID NO: 8689
  source 1..264: mol_type = unassigned DNA

SEQ ID NO: 11619 - DNA, 59 bp, Homo sapiens; identical to SEQ ID NO: 8700
  source 1..59: mol_type = unassigned DNA

SEQ ID NO: 11620 - skipped

SEQ ID NO: 11621 - DNA, 324 bp, Homo sapiens; identical to SEQ ID NO: 8722
  source 1..324: mol_type = unassigned DNA

SEQ ID NO: 11622 - DNA, 102 bp, Homo sapiens; identical to SEQ ID NO: 8730
  source 1..102: mol_type = unassigned DNA

SEQ ID NO: 11623 - DNA, 24 bp, Homo sapiens
  source 1..24: mol_type = unassigned DNA
cgtgggcggcagcgagtcgttgcg

SEQ ID NO: 11624 - DNA, 521 bp, Homo sapiens; identical to SEQ ID NO: 8732
  source 1..521: mol_type = unassigned DNA

SEQ ID NO: 11625 - DNA, 1484 bp, Homo sapiens; identical to SEQ ID NO: 8733
  source 1..1484: mol_type = unassigned DNA

SEQ ID NO: 11626 - DNA, 34 bp, Homo sapiens; identical to SEQ ID NO: 8734
  source 1..34: mol_type = unassigned DNA

SEQ ID NO: 11627 - DNA, 14 bp, Homo sapiens
  source 1..14: mol_type = unassigned DNA
cgagcccctcgccg

SEQ ID NO: 11628 - DNA, 37 bp, Homo sapiens; identical to SEQ ID NO: 8736
  source 1..37: mol_type = unassigned DNA

SEQ ID NO: 11629 - DNA, 34 bp, Homo sapiens; identical to SEQ ID NO: 8737
  source 1..34: mol_type = unassigned DNA

SEQ ID NO: 11630 - DNA, 538 bp, Homo sapiens; identical to SEQ ID NO: 8738
  source 1..538: mol_type = unassigned DNA

SEQ ID NO: 11631 - DNA, 109 bp, Homo sapiens; identical to SEQ ID NO: 8739
  source 1..109: mol_type = unassigned DNA

SEQ ID NO: 11632 - DNA, 901 bp, Homo sapiens; identical to SEQ ID NO: 8740
  source 1..901: mol_type = unassigned DNA

SEQ ID NO: 11633 - DNA, 15 bp, Homo sapiens
  source 1..15: mol_type = unassigned DNA
cgcccgcgccgcccg

SEQ ID NO: 11634 - DNA, 383 bp, Homo sapiens; identical to SEQ ID NO: 8742
  source 1..383: mol_type = unassigned DNA

SEQ ID NO: 11635 - skipped

SEQ ID NO: 11636 - DNA, 624 bp, Homo sapiens; identical to SEQ ID NO: 8744
  source 1..624: mol_type = unassigned DNA

SEQ ID NO: 11637 - DNA, 94 bp, Homo sapiens; identical to SEQ ID NO: 8745
  source 1..94: mol_type = unassigned DNA

SEQ ID NO: 11638 - DNA, 63 bp, Homo sapiens; identical to SEQ ID NO: 8746
  source 1..63: mol_type = unassigned DNA

SEQ ID NO: 11639 - DNA, 41 bp, Homo sapiens; identical to SEQ ID NO: 8747
  source 1..41: mol_type = unassigned DNA

SEQ ID NO: 11640 - DNA, 1041 bp, Homo sapiens; identical to SEQ ID NO: 8748
  source 1..1041: mol_type = unassigned DNA

SEQ ID NO: 11641 - DNA, 23 bp, Homo sapiens
  source 1..23: mol_type = unassigned DNA
cgccatggcccgagccgaaggcg

SEQ ID NO: 11642 - DNA, 515 bp, Homo sapiens; identical to SEQ ID NO: 8750
  source 1..515: mol_type = unassigned DNA

SEQ ID NO: 11643 - DNA, 1017 bp, Homo sapiens; identical to SEQ ID NO: 8751
  source 1..1017: mol_type = unassigned DNA

SEQ ID NO: 11644 - skipped

SEQ ID NO: 11645 - DNA, 54 bp, Homo sapiens; identical to SEQ ID NO: 8753
  source 1..54: mol_type = unassigned DNA

SEQ ID NO: 11646 - DNA, 10 bp, Homo sapiens
  source 1..10: mol_type = unassigned DNA
cgacaacgcg

SEQ ID NO: 11647 - DNA, 26 bp, Homo sapiens
  source 1..26: mol_type = unassigned DNA
cgcggccgcctggtcgaacctgcccg

SEQ ID NO: 11648 - DNA, 934 bp, Homo sapiens; identical to SEQ ID NO: 8756
  source 1..934: mol_type = unassigned DNA

SEQ ID NO: 11649 - DNA, 279 bp, Homo sapiens; identical to SEQ ID NO: 8757
  source 1..279: mol_type = unassigned DNA

SEQ ID NO: 11650-11651 - skipped (2 entries)

SEQ ID NO: 11652 - DNA, 11 bp, Homo sapiens
  source 1..11: mol_type = unassigned DNA
cgatgcgctcg

SEQ ID NO: 11653 - DNA, 30 bp, Homo sapiens; identical to SEQ ID NO: 8761
  source 1..30: mol_type = unassigned DNA

SEQ ID NO: 11654 - DNA, 10 bp, Homo sapiens
  source 1..10: mol_type = unassigned DNA
cgcgggagcg

SEQ ID NO: 11655 - DNA, 56 bp, Homo sapiens; identical to SEQ ID NO: 8763
  source 1..56: mol_type = unassigned DNA

SEQ ID NO: 11656 - DNA, 98 bp, Homo sapiens; identical to SEQ ID NO: 8764
  source 1..98: mol_type = unassigned DNA

SEQ ID NO: 11657 - DNA, 33 bp, Homo sapiens; identical to SEQ ID NO: 8765
  source 1..33: mol_type = unassigned DNA

SEQ ID NO: 11658 - DNA, 48 bp, Homo sapiens; identical to SEQ ID NO: 8766
  source 1..48: mol_type = unassigned DNA

SEQ ID NO: 11659 - DNA, 42 bp, Homo sapiens; identical to SEQ ID NO: 8775
  source 1..42: mol_type = unassigned DNA

SEQ ID NO: 11660 - DNA, 40 bp, Homo sapiens; identical to SEQ ID NO: 8786
  source 1..40: mol_type = unassigned DNA

SEQ ID NO: 11661 - skipped

SEQ ID NO: 11662 - DNA, 42 bp, Homo sapiens; identical to SEQ ID NO: 8808
  source 1..42: mol_type = unassigned DNA

SEQ ID NO: 11663 - DNA, 20 bp, synthetic construct
  misc_feature 1..20: note = Description of Artificial Sequence: Synthetic oligonucleotide
  source 1..20: mol_type = other DNA
ygtggtgygygyggygggyg

SEQ ID NO: 11664 - DNA, 116 bp, synthetic construct; identical to SEQ ID NO: 8820
  misc_feature 1..116: note = Description of Artificial Sequence: Synthetic polynucleotide
  source 1..116: mol_type = other DNA

SEQ ID NO: 11665 - DNA, 44 bp, synthetic construct; identical to SEQ ID NO: 8831
  misc_feature 1..44: note = Description of Artificial Sequence: Synthetic oligonucleotide
  source 1..44: mol_type = other DNA

SEQ ID NO: 11666 - DNA, 34 bp, synthetic construct; identical to SEQ ID NO: 8842
  misc_feature 1..34: note = Description of Artificial Sequence: Synthetic oligonucleotide
  source 1..34: mol_type = other DNA

SEQ ID NO: 11667 - DNA, 211 bp, synthetic construct; identical to SEQ ID NO: 8853
  misc_feature 1..211: note = Description of Artificial Sequence: Synthetic polynucleotide
  source 1..211: mol_type = other DNA

SEQ ID NO: 11668 - DNA, 95 bp, synthetic construct; identical to SEQ ID NO: 8864
  misc_feature 1..95: note = Description of Artificial Sequence: Synthetic oligonucleotide
  source 1..95: mol_type = other DNA

SEQ ID NO: 11669 - DNA, 264 bp, synthetic construct; identical to SEQ ID NO: 8875
  misc_feature 1..264: note = Description of Artificial Sequence: Synthetic polynucleotide
  source 1..264: mol_type = other DNA

SEQ ID NO: 11670 - DNA, 59 bp, synthetic construct; identical to SEQ ID NO: 8886
  misc_feature 1..59: note = Description of Artificial Sequence: Synthetic oligonucleotide
  source 1..59: mol_type = other DNA

SEQ ID NO: 11671 - skipped

SEQ ID NO: 11672 - DNA, 324 bp, synthetic construct; identical to SEQ ID NO: 8908
  misc_feature 1..324: note = Description of Artificial Sequence: Synthetic polynucleotide
  source 1..324: mol_type = other DNA

SEQ ID NO: 11673 - DNA, 102 bp, synthetic construct; identical to SEQ ID NO: 8916
  misc_feature 1..102: note = Description of Artificial Sequence: Synthetic polynucleotide
  source 1..102: mol_type = other DNA

SEQ ID NO: 11674 - DNA, 24 bp, synthetic construct
  misc_feature 1..24: note = Description of Artificial Sequence: Synthetic oligonucleotide
  source 1..24: mol_type = other DNA
ygtaaygattygttgtygtttayg

SEQ ID NO: 11675 - DNA, 521 bp, synthetic construct; identical to SEQ ID NO: 8918
  misc_feature 1..521: note = Description of Artificial Sequence: Synthetic polynucleotide
  source 1..521: mol_type = other DNA

SEQ ID NO: 11676 - DNA, 1484 bp, synthetic construct; identical to SEQ ID NO: 8919
  misc_feature 1..1484: note = Description of Artificial Sequence: Synthetic polynucleotide
  source 1..1484: mol_type = other DNA

SEQ ID NO: 11677 - DNA, 34 bp, synthetic construct; identical to SEQ ID NO: 8920
  misc_feature 1..34: note = Description of Artificial Sequence: Synthetic oligonucleotide
  source 1..34: mol_type = other DNA

SEQ ID NO: 11678 - DNA, 14 bp, synthetic construct
  misc_feature 1..14: note = Description of Artificial Sequence: Synthetic oligonucleotide
  source 1..14: mol_type = other DNA
yggygaggggttyg

SEQ ID NO: 11679 - DNA, 37 bp, synthetic construct; identical to SEQ ID NO: 8922
  misc_feature 1..37: note = Description of Artificial Sequence: Synthetic oligonucleotide
  source 1..37: mol_type = other DNA

SEQ ID NO: 11680 - DNA, 34 bp, synthetic construct; identical to SEQ ID NO: 8923
  misc_feature 1..34: note = Description of Artificial Sequence: Synthetic oligonucleotide
  source 1..34: mol_type = other DNA

SEQ ID NO: 11681 - DNA, 538 bp, synthetic construct; identical to SEQ ID NO: 8924
  misc_feature 1..538: note = Description of Artificial Sequence: Synthetic polynucleotide
  source 1..538: mol_type = other DNA

SEQ ID NO: 11682 - DNA, 109 bp, synthetic construct; identical to SEQ ID NO: 8925
  misc_feature 1..109: note = Description of Artificial Sequence: Synthetic polynucleotide
  source 1..109: mol_type = other DNA

SEQ ID NO: 11683 - DNA, 901 bp, synthetic construct; identical to SEQ ID NO: 8926
  misc_feature 1..901: note = Description of Artificial Sequence: Synthetic polynucleotide
  source 1..901: mol_type = other DNA

SEQ ID NO: 11684 - DNA, 15 bp, synthetic construct
  misc_feature 1..15: note = Description of Artificial Sequence: Synthetic oligonucleotide
  source 1..15: mol_type = other DNA
ygggyggygygggyg

SEQ ID NO: 11685 - DNA, 383 bp, synthetic construct; identical to SEQ ID NO: 8928
  misc_feature 1..383: note = Description of Artificial Sequence: Synthetic polynucleotide
  source 1..383: mol_type = other DNA

SEQ ID NO: 11686 - skipped

SEQ ID NO: 11687 - DNA, 624 bp, synthetic construct; identical to SEQ ID NO: 8930
  misc_feature 1..624: note = Description of Artificial Sequence: Synthetic polynucleotide
  source 1..624: mol_type = other DNA

SEQ ID NO: 11688 - DNA, 94 bp, synthetic construct; identical to SEQ ID NO: 8931
  misc_feature 1..94: note = Description of Artificial Sequence: Synthetic oligonucleotide
  source 1..94: mol_type = other DNA

SEQ ID NO: 11689 - DNA, 63 bp, synthetic construct; identical to SEQ ID NO: 8932
  misc_feature 1..63: note = Description of Artificial Sequence: Synthetic oligonucleotide
  source 1..63: mol_type = other DNA

SEQ ID NO: 11690 - DNA, 41 bp, synthetic construct; identical to SEQ ID NO: 8933
  misc_feature 1..41: note = Description of Artificial Sequence: Synthetic oligonucleotide
  source 1..41: mol_type = other DNA

SEQ ID NO: 11691 - DNA, 1041 bp, synthetic construct; identical to SEQ ID NO: 8934
  misc_feature 1..1041: note = Description of Artificial Sequence: Synthetic polynucleotide
  source 1..1041: mol_type = other DNA

SEQ ID NO: 11692 - DNA, 23 bp, synthetic construct
  misc_feature 1..23: note = Description of Artificial Sequence: Synthetic oligonucleotide
  source 1..23: mol_type = other DNA
ygttttyggttygggttatggyg

SEQ ID NO: 11693 - DNA, 515 bp, synthetic construct; identical to SEQ ID NO: 8936
  misc_feature 1..515: note = Description of Artificial Sequence: Synthetic polynucleotide
  source 1..515: mol_type = other DNA

SEQ ID NO: 11694 - DNA, 1017 bp, synthetic construct; identical to SEQ ID NO: 8937
  misc_feature 1..1017: note = Description of Artificial Sequence: Synthetic polynucleotide
  source 1..1017: mol_type = other DNA

SEQ ID NO: 11695 - skipped

SEQ ID NO: 11696 - DNA, 54 bp, synthetic construct; identical to SEQ ID NO: 8939
  misc_feature 1..54: note = Description of Artificial Sequence: Synthetic oligonucleotide
  source 1..54: mol_type = other DNA

SEQ ID NO: 11697 - DNA, 10 bp, synthetic construct
  misc_feature 1..10: note = Description of Artificial Sequence: Synthetic oligonucleotide
  source 1..10: mol_type = other DNA
ygygttgtyg

SEQ ID NO: 11698 - DNA, 26 bp, synthetic construct
  misc_feature 1..26: note = Description of Artificial Sequence: Synthetic oligonucleotide
  source 1..26: mol_type = other DNA
ygggtaggttygattaggyggtygyg

SEQ ID NO: 11699 - DNA, 934 bp, synthetic construct; identical to SEQ ID NO: 8942
  misc_feature 1..934: note = Description of Artificial Sequence: Synthetic polynucleotide
  source 1..934: mol_type = other DNA

SEQ ID NO: 11700 - DNA, 279 bp, synthetic construct; identical to SEQ ID NO: 8943
  misc_feature 1..279: note = Description of Artificial Sequence: Synthetic polynucleotide
  source 1..279: mol_type = other DNA

SEQ ID NO: 11701-11702 - skipped (2 entries)

SEQ ID NO: 11703 - DNA, 11 bp, synthetic construct
  misc_feature 1..11: note = Description of Artificial Sequence: Synthetic oligonucleotide
  source 1..11: mol_type = other DNA
ygagygtatyg

SEQ ID NO: 11704 - DNA, 30 bp, synthetic construct; identical to SEQ ID NO: 8947
  misc_feature 1..30: note = Description of Artificial Sequence: Synthetic oligonucleotide
  source 1..30: mol_type = other DNA

SEQ ID NO: 11705 - DNA, 10 bp, synthetic construct
  misc_feature 1..10: note = Description of Artificial Sequence: Synthetic oligonucleotide
  source 1..10: mol_type = other DNA
ygttttygyg

SEQ ID NO: 11706 - DNA, 56 bp, synthetic construct; identical to SEQ ID NO: 8949
  misc_feature 1..56: note = Description of Artificial Sequence: Synthetic oligonucleotide
  source 1..56: mol_type = other DNA

SEQ ID NO: 11707 - DNA, 98 bp, synthetic construct; identical to SEQ ID NO: 8950
  misc_feature 1..98: note = Description of Artificial Sequence: Synthetic oligonucleotide
  source 1..98: mol_type = other DNA

SEQ ID NO: 11708 - DNA, 33 bp, synthetic construct; identical to SEQ ID NO: 8951
  misc_feature 1..33: note = Description of Artificial Sequence: Synthetic oligonucleotide
  source 1..33: mol_type = other DNA

SEQ ID NO: 11709 - DNA, 48 bp, synthetic construct; identical to SEQ ID NO: 8952
  misc_feature 1..48: note = Description of Artificial Sequence: Synthetic oligonucleotide
  source 1..48: mol_type = other DNA

SEQ ID NO: 11710 - DNA, 42 bp, synthetic construct; identical to SEQ ID NO: 8961
  misc_feature 1..42: note = Description of Artificial Sequence: Synthetic oligonucleotide
  source 1..42: mol_type = other DNA

SEQ ID NO: 11711 - DNA, 40 bp, synthetic construct; identical to SEQ ID NO: 8972
  misc_feature 1..40: note = Description of Artificial Sequence: Synthetic oligonucleotide
  source 1..40: mol_type = other DNA

SEQ ID NO: 11712 - skipped

SEQ ID NO: 11713 - DNA, 42 bp, synthetic construct; identical to SEQ ID NO: 8994
  misc_feature 1..42: note = Description of Artificial Sequence: Synthetic oligonucleotide
  source 1..42: mol_type = other DNA

SEQ ID NO: 11714 - DNA, 20 bp, synthetic construct
  misc_feature 1..20: note = Description of Artificial Sequence: Synthetic oligonucleotide
  source 1..20: mol_type = other DNA
cgtggtgcgcgcggcgggcg

SEQ ID NO: 11715 - DNA, 116 bp, synthetic construct; identical to SEQ ID NO: 9006
  misc_feature 1..116: note = Description of Artificial Sequence: Synthetic polynucleotide
  source 1..116: mol_type = other DNA

SEQ ID NO: 11716 - DNA, 44 bp, synthetic construct; identical to SEQ ID NO: 9017
  misc_feature 1..44: note = Description of Artificial Sequence: Synthetic oligonucleotide
  source 1..44: mol_type = other DNA

SEQ ID NO: 11717 - DNA, 34 bp, synthetic construct; identical to SEQ ID NO: 9028
  misc_feature 1..34: note = Description of Artificial Sequence: Synthetic oligonucleotide
  source 1..34: mol_type = other DNA

SEQ ID NO: 11718 - DNA, 211 bp, synthetic construct; identical to SEQ ID NO: 9039
  misc_feature 1..211: note = Description of Artificial Sequence: Synthetic polynucleotide
  source 1..211: mol_type = other DNA

SEQ ID NO: 11719 - DNA, 95 bp, synthetic construct; identical to SEQ ID NO: 9050
  misc_feature 1..95: note = Description of Artificial Sequence: Synthetic oligonucleotide
  source 1..95: mol_type = other DNA

SEQ ID NO: 11720 - DNA, 264 bp, synthetic construct; identical to SEQ ID NO: 9061
  misc_feature 1..264: note = Description of Artificial Sequence: Synthetic polynucleotide
  source 1..264: mol_type = other DNA

SEQ ID NO: 11721 - DNA, 59 bp, synthetic construct; identical to SEQ ID NO: 9072
  misc_feature 1..59: note = Description of Artificial Sequence: Synthetic oligonucleotide
  source 1..59: mol_type = other DNA

SEQ ID NO: 11722 - skipped

SEQ ID NO: 11723 - DNA, 324 bp, synthetic construct; identical to SEQ ID NO: 9094
  misc_feature 1..324: note = Description of Artificial Sequence: Synthetic polynucleotide
  source 1..324: mol_type = other DNA

SEQ ID NO: 11724 - DNA, 102 bp, synthetic construct; identical to SEQ ID NO: 9102
  misc_feature 1..102: note = Description of Artificial Sequence: Synthetic polynucleotide
  source 1..102: mol_type = other DNA

SEQ ID NO: 11725 - DNA, 24 bp, synthetic construct
  misc_feature 1..24: note = Description of Artificial Sequence: Synthetic oligonucleotide
  source 1..24: mol_type = other DNA
cgtaacgattcgttgtcgtttacg

SEQ ID NO: 11726 - DNA, 521 bp, synthetic construct; identical to SEQ ID NO: 9104
  misc_feature 1..521: note = Description of Artificial Sequence: Synthetic polynucleotide
  source 1..521: mol_type = other DNA

SEQ ID NO: 11727 - DNA, 1484 bp, synthetic construct; identical to SEQ ID NO: 9105
  misc_feature 1..1484: note = Description of Artificial Sequence: Synthetic polynucleotide
  source 1..1484: mol_type = other DNA

SEQ ID NO: 11728 - DNA, 34 bp, synthetic construct; identical to SEQ ID NO: 9106
  misc_feature 1..34: note = Description of Artificial Sequence: Synthetic oligonucleotide
  source 1..34: mol_type = other DNA

SEQ ID NO: 11729 - DNA, 14 bp, synthetic construct
  misc_feature 1..14: note = Description of Artificial Sequence: Synthetic oligonucleotide
  source 1..14: mol_type = other DNA
cggcgaggggttcg

SEQ ID NO: 11730 - DNA, 37 bp, synthetic construct; identical to SEQ ID NO: 9108
  misc_feature 1..37: note = Description of Artificial Sequence: Synthetic oligonucleotide
  source 1..37: mol_type = other DNA

SEQ ID NO: 11731 - DNA, 34 bp, synthetic construct; identical to SEQ ID NO: 9109
  misc_feature 1..34: note = Description of Artificial Sequence: Synthetic oligonucleotide
  source 1..34: mol_type = other DNA

SEQ ID NO: 11732 - DNA, 538 bp, synthetic construct; identical to SEQ ID NO: 9110
  misc_feature 1..538: note = Description of Artificial Sequence: Synthetic polynucleotide
  source 1..538: mol_type = other DNA

SEQ ID NO: 11733 - DNA, 109 bp, synthetic construct; identical to SEQ ID NO: 9111
  misc_feature 1..109: note = Description of Artificial Sequence: Synthetic polynucleotide
  source 1..109: mol_type = other DNA

SEQ ID NO: 11734 - DNA, 901 bp, synthetic construct; identical to SEQ ID NO: 9112
  misc_feature 1..901: note = Description of Artificial Sequence: Synthetic polynucleotide
  source 1..901: mol_type = other DNA

SEQ ID NO: 11735 - DNA, 15 bp, synthetic construct
  misc_feature 1..15: note = Description of Artificial Sequence: Synthetic oligonucleotide
  source 1..15: mol_type = other DNA
cgggcggcgcgggcg

SEQ ID NO: 11736 - DNA, 383 bp, synthetic construct; identical to SEQ ID NO: 9114
  misc_feature 1..383: note = Description of Artificial Sequence: Synthetic polynucleotide
  source 1..383: mol_type = other DNA

SEQ ID NO: 11737 - skipped

SEQ ID NO: 11738 - DNA, 624 bp, synthetic construct; identical to SEQ ID NO: 9116
  misc_feature 1..624: note = Description of Artificial Sequence: Synthetic polynucleotide
  source 1..624: mol_type = other DNA

SEQ ID NO: 11739 - DNA, 94 bp, synthetic construct; identical to SEQ ID NO: 9117
  misc_feature 1..94: note = Description of Artificial Sequence: Synthetic oligonucleotide
  source 1..94: mol_type = other DNA

SEQ ID NO: 11740 - DNA, 63 bp, synthetic construct; identical to SEQ ID NO: 9118
  misc_feature 1..63: note = Description of Artificial Sequence: Synthetic oligonucleotide
  source 1..63: mol_type = other DNA

SEQ ID NO: 11741 - DNA, 41 bp, synthetic construct; identical to SEQ ID NO: 9119
  misc_feature 1..41: note = Description of Artificial Sequence: Synthetic oligonucleotide
  source 1..41: mol_type = other DNA

SEQ ID NO: 11742 - DNA, 1041 bp, synthetic construct; identical to SEQ ID NO: 9120
  misc_feature 1..1041: note = Description of Artificial Sequence: Synthetic polynucleotide
  source 1..1041: mol_type = other DNA

SEQ ID NO: 11743 - DNA, 23 bp, synthetic construct
  misc_feature 1..23: note = Description of Artificial Sequence: Synthetic oligonucleotide
  source 1..23: mol_type = other DNA
cgttttcggttcgggttatggcg

SEQ ID NO: 11744 - DNA, 515 bp, synthetic construct; identical to SEQ ID NO: 9122
  misc_feature 1..515: note = Description of Artificial Sequence: Synthetic polynucleotide
  source 1..515: mol_type = other DNA

SEQ ID NO: 11745 - DNA, 1017 bp, synthetic construct; identical to SEQ ID NO: 9123
  misc_feature 1..1017: note = Description of Artificial Sequence: Synthetic polynucleotide
  source 1..1017: mol_type = other DNA

SEQ ID NO: 11746 - skipped

SEQ ID NO: 11747 - DNA, 54 bp, synthetic construct; identical to SEQ ID NO: 9125
  misc_feature 1..54: note = Description of Artificial Sequence: Synthetic oligonucleotide
  source 1..54: mol_type = other DNA

SEQ ID NO: 11748 - DNA, 10 bp, synthetic construct
  misc_feature 1..10: note = Description of Artificial Sequence: Synthetic oligonucleotide
  source 1..10: mol_type = other DNA
cgcgttgtcg

SEQ ID NO: 11749 - DNA, 26 bp, synthetic construct
  misc_feature 1..26: note = Description of Artificial Sequence: Synthetic oligonucleotide
  source 1..26: mol_type = other DNA
cgggtaggttcgattaggcggtcgcg

SEQ ID NO: 11750 - DNA, 934 bp, synthetic construct; identical to SEQ ID NO: 9128
  misc_feature 1..934: note = Description of Artificial Sequence: Synthetic polynucleotide
  source 1..934: mol_type = other DNA

SEQ ID NO: 11751 - DNA, 279 bp, synthetic construct; identical to SEQ ID NO: 9129
  misc_feature 1..279: note = Description of Artificial Sequence: Synthetic polynucleotide
  source 1..279: mol_type = other DNA

SEQ ID NO: 11752-11753 - skipped (2 entries)

SEQ ID NO: 11754 - DNA, 11 bp, synthetic construct
  misc_feature 1..11: note = Description of Artificial Sequence: Synthetic oligonucleotide
  source 1..11: mol_type = other DNA
cgagcgtatcg

SEQ ID NO: 11755 - DNA, 30 bp, synthetic construct; identical to SEQ ID NO: 9133
  misc_feature 1..30: note = Description of Artificial Sequence: Synthetic oligonucleotide
  source 1..30: mol_type = other DNA

SEQ ID NO: 11756 - DNA, 10 bp, synthetic construct
  misc_feature 1..10: note = Description of Artificial Sequence: Synthetic oligonucleotide
  source 1..10: mol_type = other DNA
cgttttcgcg

SEQ ID NO: 11757 - DNA, 56 bp, synthetic construct; identical to SEQ ID NO: 9135
  misc_feature 1..56: note = Description of Artificial Sequence: Synthetic oligonucleotide
  source 1..56: mol_type = other DNA

SEQ ID NO: 11758 - DNA, 98 bp, synthetic construct; identical to SEQ ID NO: 9136
  misc_feature 1..98: note = Description of Artificial Sequence: Synthetic oligonucleotide
  source 1..98: mol_type = other DNA

SEQ ID NO: 11759 - DNA, 33 bp, synthetic construct; identical to SEQ ID NO: 9137
  misc_feature 1..33: note = Description of Artificial Sequence: Synthetic oligonucleotide
  source 1..33: mol_type = other DNA

SEQ ID NO: 11760 - DNA, 48 bp, synthetic construct; identical to SEQ ID NO: 9138
  misc_feature 1..48: note = Description of Artificial Sequence: Synthetic oligonucleotide
  source 1..48: mol_type = other DNA

SEQ ID NO: 11761 - DNA, 42 bp, synthetic construct; identical to SEQ ID NO: 9147
  misc_feature 1..42: note = Description of Artificial Sequence: Synthetic oligonucleotide
  source 1..42: mol_type = other DNA

SEQ ID NO: 11762 - DNA, 40 bp, synthetic construct; identical to SEQ ID NO: 9158
  misc_feature 1..40: note = Description of Artificial Sequence: Synthetic oligonucleotide
  source 1..40: mol_type = other DNA

SEQ ID NO: 11763 - skipped

SEQ ID NO: 11764 - DNA, 42 bp, synthetic construct; identical to SEQ ID NO: 9180
  misc_feature 1..42: note = Description of Artificial Sequence: Synthetic oligonucleotide
  source 1..42: mol_type = other DNA

SEQ ID NO: 11765 - DNA, 20 bp, synthetic construct
  misc_feature 1..20: note = Description of Artificial Sequence: Synthetic oligonucleotide
  source 1..20: mol_type = other DNA
ygttygtygygygtattayg

SEQ ID NO: 11766 - DNA, 116 bp, synthetic construct; identical to SEQ ID NO: 9192
  misc_feature 1..116: note = Description of Artificial Sequence: Synthetic polynucleotide
  source 1..116: mol_type = other DNA

SEQ ID NO: 11767 - DNA, 44 bp, synthetic construct; identical to SEQ ID NO: 9203
  misc_feature 1..44: note = Description of Artificial Sequence: Synthetic oligonucleotide
  source 1..44: mol_type = other DNA

SEQ ID NO: 11768 - DNA, 34 bp, synthetic construct; identical to SEQ ID NO: 9214
  misc_feature 1..34: note = Description of Artificial Sequence: Synthetic oligonucleotide
  source 1..34: mol_type = other DNA

SEQ ID NO: 11769 - DNA, 211 bp, synthetic construct; identical to SEQ ID NO: 9225
  misc_feature 1..211: note = Description of Artificial Sequence: Synthetic polynucleotide
  source 1..211: mol_type = other DNA

SEQ ID NO: 11770 - DNA, 95 bp, synthetic construct; identical to SEQ ID NO: 9236
  misc_feature 1..95: note = Description of Artificial Sequence: Synthetic oligonucleotide
  source 1..95: mol_type = other DNA

SEQ ID NO: 11771 - DNA, 264 bp, synthetic construct; identical to SEQ ID NO: 9247
  misc_feature 1..264: note = Description of Artificial Sequence: Synthetic polynucleotide
  source 1..264: mol_type = other DNA

SEQ ID NO: 11772 - DNA, 59 bp, synthetic construct; identical to SEQ ID NO: 9258
  misc_feature 1..59: note = Description of Artificial Sequence: Synthetic oligonucleotide
  source 1..59: mol_type = other DNA

SEQ ID NO: 11773 - skipped

SEQ ID NO: 11774 - DNA, 324 bp, synthetic construct; identical to SEQ ID NO: 9280
  misc_feature 1..324: note = Description of Artificial Sequence: Synthetic polynucleotide
  source 1..324: mol_type = other DNA

SEQ ID NO: 11775 - DNA, 102 bp, synthetic construct; identical to SEQ ID NO: 9288
  misc_feature 1..102: note = Description of Artificial Sequence: Synthetic polynucleotide
  source 1..102: mol_type = other DNA

SEQ ID NO: 11776 - DNA, 24 bp, synthetic construct
  misc_feature 1..24: note = Description of Artificial Sequence: Synthetic oligonucleotide
  source 1..24: mol_type = other DNA
ygtgggyggtagygagtygttgyg

SEQ ID NO: 11777 - DNA, 521 bp, synthetic construct; identical to SEQ ID NO: 9290
  misc_feature 1..521: note = Description of Artificial Sequence: Synthetic polynucleotide
  source 1..521: mol_type = other DNA

SEQ ID NO: 11778 - DNA, 1484 bp, synthetic construct; identical to SEQ ID NO: 9291
  misc_feature 1..1484: note = Description of Artificial Sequence: Synthetic polynucleotide
  source 1..1484: mol_type = other DNA

SEQ ID NO: 11779 - DNA, 34 bp, synthetic construct; identical to SEQ ID NO: 9292
  misc_feature 1..34: note = Description of Artificial Sequence: Synthetic oligonucleotide
  source 1..34: mol_type = other DNA

SEQ ID NO: 11780 - DNA, 14 bp, synthetic construct
  misc_feature 1..14: note = Description of Artificial Sequence: Synthetic oligonucleotide
  source 1..14: mol_type = other DNA
ygagtttttygtyg

SEQ ID NO: 11781 - DNA, 37 bp, synthetic construct; identical to SEQ ID NO: 9294
  misc_feature 1..37: note = Description of Artificial Sequence: Synthetic oligonucleotide
  source 1..37: mol_type = other DNA

SEQ ID NO: 11782 - DNA, 34 bp, synthetic construct; identical to SEQ ID NO: 9295
  misc_feature 1..34: note = Description of Artificial Sequence: Synthetic oligonucleotide
  source 1..34: mol_type = other DNA

SEQ ID NO: 11783 - DNA, 538 bp, synthetic construct; identical to SEQ ID NO: 9296
  misc_feature 1..538: note = Description of Artificial Sequence: Synthetic polynucleotide
  source 1..538: mol_type = other DNA

SEQ ID NO: 11784 - DNA, 109 bp, synthetic construct; identical to SEQ ID NO: 9297
  misc_feature 1..109: note = Description of Artificial Sequence: Synthetic polynucleotide
  source 1..109: mol_type = other DNA

SEQ ID NO: 11785 - DNA, 901 bp, synthetic construct; identical to SEQ ID NO: 9298
  misc_feature 1..901: note = Description of Artificial Sequence: Synthetic polynucleotide
  source 1..901: mol_type = other DNA

SEQ ID NO: 11786 - DNA, 15 bp, synthetic construct
  misc_feature 1..15: note = Description of Artificial Sequence: Synthetic oligonucleotide
  source 1..15: mol_type = other DNA
ygttygygtygttyg

SEQ ID NO: 11787 - DNA, 383 bp, synthetic construct; identical to SEQ ID NO: 9300
  misc_feature 1..383: note = Description of Artificial Sequence: Synthetic polynucleotide
  source 1..383: mol_type = other DNA

SEQ ID NO: 11788 - skipped

SEQ ID NO: 11789 - DNA, 624 bp, synthetic construct; identical to SEQ ID NO: 9302
  misc_feature 1..624: note = Description of Artificial Sequence: Synthetic polynucleotide
  source 1..624: mol_type = other DNA

SEQ ID NO: 11790 - DNA, 94 bp, synthetic construct; identical to SEQ ID NO: 9303
  misc_feature 1..94: note = Description of Artificial Sequence: Synthetic oligonucleotide
  source 1..94: mol_type = other DNA

SEQ ID NO: 11791 - DNA, 63 bp, synthetic construct; identical to SEQ ID NO: 9304
  misc_feature 1..63: note = Description of Artificial Sequence: Synthetic oligonucleotide
  source 1..63: mol_type = other DNA

SEQ ID NO: 11792 - DNA, 41 bp, synthetic construct; identical to SEQ ID NO: 9305
  misc_feature 1..41: note = Description of Artificial Sequence: Synthetic oligonucleotide
  source 1..41: mol_type = other DNA

SEQ ID NO: 11793 - DNA, 1041 bp, synthetic construct; identical to SEQ ID NO: 9306
  misc_feature 1..1041: note = Description of Artificial Sequence: Synthetic polynucleotide
  source 1..1041: mol_type = other DNA

SEQ ID NO: 11794 - DNA, 23 bp, synthetic construct
  misc_feature 1..23: note = Description of Artificial Sequence: Synthetic oligonucleotide
  source 1..23: mol_type = other DNA
ygttatggttygagtygaaggyg

SEQ ID NO: 11795 - DNA, 515 bp, synthetic construct; identical to SEQ ID NO: 9308
  misc_feature 1..515: note = Description of Artificial Sequence: Synthetic polynucleotide
  source 1..515: mol_type = other DNA

SEQ ID NO: 11796 - DNA, 1017 bp, synthetic construct; identical to SEQ ID NO: 9309
  misc_feature 1..1017: note = Description of Artificial Sequence: Synthetic polynucleotide
  source 1..1017: mol_type = other DNA

SEQ ID NO: 11797 - skipped

SEQ ID NO: 11798 - DNA, 54 bp, synthetic construct; identical to SEQ ID NO: 9311
  misc_feature 1..54: note = Description of Artificial Sequence: Synthetic oligonucleotide
  source 1..54: mol_type = other DNA

SEQ ID NO: 11799 - DNA, 10 bp, synthetic construct
  misc_feature 1..10: note = Description of Artificial Sequence: Synthetic oligonucleotide
  source 1..10: mol_type = other DNA
ygataaygyg

SEQ ID NO: 11800 - DNA, 26 bp, synthetic construct
  misc_feature 1..26: note = Description of Artificial Sequence: Synthetic oligonucleotide
  source 1..26: mol_type = other DNA
ygyggtygtttggtygaatttgttyg

SEQ ID NO: 11801 - DNA, 934 bp, synthetic construct; identical to SEQ ID NO: 9314
  misc_feature 1..934: note = Description of Artificial Sequence: Synthetic polynucleotide
  source 1..934: mol_type = other DNA

SEQ ID NO: 11802 - DNA, 279 bp, synthetic construct; identical to SEQ ID NO: 9315
  misc_feature 1..279: note = Description of Artificial Sequence: Synthetic polynucleotide
  source 1..279: mol_type = other DNA

SEQ ID NO: 11803-11804 - skipped (2 entries)

SEQ ID NO: 11805 - DNA, 11 bp, synthetic construct
  misc_feature 1..11: note = Description of Artificial Sequence: Synthetic oligonucleotide
  source 1..11: mol_type = other DNA
ygatgygttyg

SEQ ID NO: 11806 - DNA, 30 bp, synthetic construct; identical to SEQ ID NO: 9319
  misc_feature 1..30: note = Description of Artificial Sequence: Synthetic oligonucleotide
  source 1..30: mol_type = other DNA

SEQ ID NO: 11807 - DNA, 10 bp, synthetic construct
  misc_feature 1..10: note = Description of Artificial Sequence: Synthetic oligonucleotide
  source 1..10: mol_type = other DNA
ygygggagyg

SEQ ID NO: 11808 - DNA, 56 bp, synthetic construct; identical to SEQ ID NO: 9321
  misc_feature 1..56: note = Description of Artificial Sequence: Synthetic oligonucleotide
  source 1..56: mol_type = other DNA

SEQ ID NO: 11809 - DNA, 98 bp, synthetic construct; identical to SEQ ID NO: 9322
  misc_feature 1..98: note = Description of Artificial Sequence: Synthetic oligonucleotide
  source 1..98: mol_type = other DNA

SEQ ID NO: 11810 - DNA, 33 bp, synthetic construct; identical to SEQ ID NO: 9323
  misc_feature 1..33: note = Description of Artificial Sequence: Synthetic oligonucleotide
  source 1..33: mol_type = other DNA

SEQ ID NO: 11811 - DNA, 48 bp, synthetic construct; identical to SEQ ID NO: 9324
  misc_feature 1..48: note = Description of Artificial Sequence: Synthetic oligonucleotide
  source 1..48: mol_type = other DNA

SEQ ID NO: 11812 - DNA, 42 bp, synthetic construct; identical to SEQ ID NO: 9333
  misc_feature 1..42: note = Description of Artificial Sequence: Synthetic oligonucleotide
  source 1..42: mol_type = other DNA

SEQ ID NO: 11813 - DNA, 40 bp, synthetic construct; identical to SEQ ID NO: 9344
  misc_feature 1..40: note = Description of Artificial Sequence: Synthetic oligonucleotide
  source 1..40: mol_type = other DNA

SEQ ID NO: 11814 - skipped

SEQ ID NO: 11815 - DNA, 42 bp, synthetic construct; identical to SEQ ID NO: 9366
  misc_feature 1..42: note = Description of Artificial Sequence: Synthetic oligonucleotide
  source 1..42: mol_type = other DNA

SEQ ID NO: 11816 - DNA, 20 bp, synthetic construct
  misc_feature 1..20: note = Description of Artificial Sequence: Synthetic oligonucleotide
  source 1..20: mol_type = other DNA
cgttcgtcgcgcgtattacg

SEQ ID NO: 11817 - DNA, 116 bp, synthetic construct; identical to SEQ ID NO: 9378
  misc_feature 1..116: note = Description of Artificial Sequence: Synthetic polynucleotide
  source 1..116: mol_type = other DNA

SEQ ID NO: 11818 - DNA, 44 bp, synthetic construct; identical to SEQ ID NO: 9389
  misc_feature 1..44: note = Description of Artificial Sequence: Synthetic oligonucleotide
  source 1..44: mol_type = other DNA

SEQ ID NO: 11819 - DNA, 34 bp, synthetic construct; identical to SEQ ID NO: 9400
  misc_feature 1..34: note = Description of Artificial Sequence: Synthetic oligonucleotide
  source 1..34: mol_type = other DNA

SEQ ID NO: 11820 - DNA, 211 bp, synthetic construct; identical to SEQ ID NO: 9411
  misc_feature 1..211: note = Description of Artificial Sequence: Synthetic polynucleotide
  source 1..211: mol_type = other DNA

SEQ ID NO: 11821 - DNA, 95 bp, synthetic construct; identical to SEQ ID NO: 9422
  misc_feature 1..95: note = Description of Artificial Sequence: Synthetic oligonucleotide
  source 1..95: mol_type = other DNA

SEQ ID NO: 11822 - DNA, 264 bp, synthetic construct; identical to SEQ ID NO: 9433
  misc_feature 1..264: note = Description of Artificial Sequence: Synthetic polynucleotide
  source 1..264: mol_type = other DNA

SEQ ID NO: 11823 - DNA, 59 bp, synthetic construct; identical to SEQ ID NO: 9444
  misc_feature 1..59: note = Description of Artificial Sequence: Synthetic oligonucleotide
  source 1..59: mol_type = other DNA

SEQ ID NO: 11824 - skipped

SEQ ID NO: 11825 - DNA, 324 bp, synthetic construct; identical to SEQ ID NO: 9466
  misc_feature 1..324: note = Description of Artificial Sequence: Synthetic polynucleotide
  source 1..324: mol_type = other DNA

SEQ ID NO: 11826 - DNA, 102 bp, synthetic construct; identical to SEQ ID NO: 9474
  misc_feature 1..102: note = Description of Artificial Sequence: Synthetic polynucleotide
  source 1..102: mol_type = other DNA

SEQ ID NO: 11827 - DNA, 24 bp, synthetic construct
  misc_feature 1..24: note = Description of Artificial Sequence: Synthetic oligonucleotide
  source 1..24: mol_type = other DNA
cgtgggcggtagcgagtcgttgcg

SEQ ID NO: 11828 - DNA, 521 bp, synthetic construct; identical to SEQ ID NO: 9476
  misc_feature 1..521: note = Description of Artificial Sequence: Synthetic polynucleotide
  source 1..521: mol_type = other DNA

SEQ ID NO: 11829 - DNA, 1484 bp, synthetic construct; identical to SEQ ID NO: 9477
  misc_feature 1..1484: note = Description of Artificial Sequence: Synthetic polynucleotide
  source 1..1484: mol_type = other DNA

SEQ ID NO: 11830 - DNA, 34 bp, synthetic construct; identical to SEQ ID NO: 8734
  misc_feature 1..34: note = Description of Artificial Sequence: Synthetic oligonucleotide
  source 1..34: mol_type = other DNA

SEQ ID NO: 11831 - DNA, 14 bp, synthetic construct
  misc_feature 1..14: note = Description of Artificial Sequence: Synthetic oligonucleotide
  source 1..14: mol_type = other DNA
cgagtttttcgtcg

SEQ ID NO: 11832 - DNA, 37 bp, synthetic construct; identical to SEQ ID NO: 9480
  misc_feature 1..37: note = Description of Artificial Sequence: Synthetic oligonucleotide
  source 1..37: mol_type = other DNA

SEQ ID NO: 11833 - DNA, 34 bp, synthetic construct; identical to SEQ ID NO: 9481
  misc_feature 1..34: note = Description of Artificial Sequence: Synthetic oligonucleotide
  source 1..34: mol_type = other DNA

SEQ ID NO: 11834 - DNA, 538 bp, synthetic construct; identical to SEQ ID NO: 9482
  misc_feature 1..538: note = Description of Artificial Sequence: Synthetic polynucleotide
  source 1..538: mol_type = other DNA

SEQ ID NO: 11835 - DNA, 109 bp, synthetic construct; identical to SEQ ID NO: 9483
  misc_feature 1..109: note = Description of Artificial Sequence: Synthetic polynucleotide
  source 1..109: mol_type = other DNA

SEQ ID NO: 11836 - DNA, 901 bp, synthetic construct; identical to SEQ ID NO: 9484
  misc_feature 1..901: note = Description of Artificial Sequence: Synthetic polynucleotide
  source 1..901: mol_type = other DNA

SEQ ID NO: 11837 - DNA, 15 bp, synthetic construct
  misc_feature 1..15: note = Description of Artificial Sequence: Synthetic oligonucleotide
  source 1..15: mol_type = other DNA
cgttcgcgtcgttcg

SEQ ID NO: 11838 - DNA, 383 bp, synthetic construct; identical to SEQ ID NO: 9486
  misc_feature 1..383: note = Description of Artificial Sequence: Synthetic polynucleotide
  source 1..383: mol_type = other DNA

SEQ ID NO: 11839 - skipped

SEQ ID NO: 11840 - DNA, 624 bp, synthetic construct; identical to SEQ ID NO: 9488
  misc_feature 1..624: note = Description of Artificial Sequence: Synthetic polynucleotide
  source 1..624: mol_type = other DNA

SEQ ID NO: 11841 - DNA, 94 bp, synthetic construct; identical to SEQ ID NO: 9489
  misc_feature 1..94: note = Description of Artificial Sequence: Synthetic oligonucleotide
  source 1..94: mol_type = other DNA

SEQ ID NO: 11842 - DNA, 63 bp, synthetic construct; identical to SEQ ID NO: 9490
  misc_feature 1..63: note = Description of Artificial Sequence: Synthetic oligonucleotide
  source 1..63: mol_type = other DNA

SEQ ID NO: 11843 - DNA, 41 bp, synthetic construct; identical to SEQ ID NO: 9491
  misc_feature 1..41: note = Description of Artificial Sequence: Synthetic oligonucleotide
  source 1..41: mol_type = other DNA

SEQ ID NO: 11844 - DNA, 1041 bp, synthetic construct; identical to SEQ ID NO: 9492
  misc_feature 1..1041: note = Description of Artificial Sequence: Synthetic polynucleotide
  source 1..1041: mol_type = other DNA

SEQ ID NO: 11845 - DNA, 23 bp, synthetic construct
  misc_feature 1..23: note = Description of Artificial Sequence: Synthetic oligonucleotide
  source 1..23: mol_type = other DNA
cgttatggttcgagtcgaaggcg

SEQ ID NO: 11846 - DNA, 515 bp, synthetic construct; identical to SEQ ID NO: 9494
  misc_feature 1..515: note = Description of Artificial Sequence: Synthetic polynucleotide
  source 1..515: mol_type = other DNA

SEQ ID NO: 11847 - DNA, 1017 bp, synthetic construct; identical to SEQ ID NO: 9495
  misc_feature 1..1017: note = Description of Artificial Sequence: Synthetic polynucleotide
  source 1..1017: mol_type = other DNA

SEQ ID NO: 11848 - skipped

SEQ ID NO: 11849 - DNA, 54 bp, synthetic construct; identical to SEQ ID NO: 9497
  misc_feature 1..54: note = Description of Artificial Sequence: Synthetic oligonucleotide
  source 1..54: mol_type = other DNA

SEQ ID NO: 11850 - DNA, 10 bp, synthetic construct
  misc_feature 1..10: note = Description of Artificial Sequence: Synthetic oligonucleotide
  source 1..10: mol_type = other DNA
cgataacgcg

SEQ ID NO: 11851 - DNA, 26 bp, synthetic construct
  misc_feature 1..26: note = Description of Artificial Sequence: Synthetic oligonucleotide
  source 1..26: mol_type = other DNA
cgcggtcgtttggtcgaatttgttcg

SEQ ID NO: 11852 - DNA, 934 bp, synthetic construct; identical to SEQ ID NO: 9500
  misc_feature 1..934: note = Description of Artificial Sequence: Synthetic polynucleotide
  source 1..934: mol_type = other DNA

SEQ ID NO: 11853 - DNA, 279 bp, synthetic construct; identical to SEQ ID NO: 9501
  misc_feature 1..279: note = Description of Artificial Sequence: Synthetic polynucleotide
  source 1..279: mol_type = other DNA

SEQ ID NO: 11854-11855 - skipped (2 entries)

SEQ ID NO: 11856 - DNA, 11 bp, synthetic construct
  misc_feature 1..11: note = Description of Artificial Sequence: Synthetic oligonucleotide
  source 1..11: mol_type = other DNA
cgatgcgttcg

SEQ ID NO: 11857 - DNA, 30 bp, synthetic construct; identical to SEQ ID NO: 9505
  misc_feature 1..30: note = Description of Artificial Sequence: Synthetic oligonucleotide
  source 1..30: mol_type = other DNA

SEQ ID NO: 11858 - DNA, 10 bp, synthetic construct
  misc_feature 1..10: note = Description of Artificial Sequence: Synthetic oligonucleotide
  source 1..10: mol_type = other DNA
cgcgggagcg

SEQ ID NO: 11859 - DNA, 56 bp, synthetic construct; identical to SEQ ID NO: 9507
  misc_feature 1..56: note = Description of Artificial Sequence: Synthetic oligonucleotide
  source 1..56: mol_type = other DNA

SEQ ID NO: 11860 - DNA, 98 bp, synthetic construct; identical to SEQ ID NO: 9508
  misc_feature 1..98: note = Description of Artificial Sequence: Synthetic oligonucleotide
  source 1..98: mol_type = other DNA

SEQ ID NO: 11861 - DNA, 33 bp, synthetic construct; identical to SEQ ID NO: 9509
  misc_feature 1..33: note = Description of Artificial Sequence: Synthetic oligonucleotide
  source 1..33: mol_type = other DNA

SEQ ID NO: 11862 - DNA, 48 bp, synthetic construct; identical to SEQ ID NO: 8766
  misc_feature 1..48: note = Description of Artificial Sequence: Synthetic oligonucleotide
  source 1..48: mol_type = other DNA

SEQ ID NO: 11863 - DNA, 42 bp, synthetic construct; identical to SEQ ID NO: 9519
  misc_feature 1..42: note = Description of Artificial Sequence: Synthetic oligonucleotide
  source 1..42: mol_type = other DNA

SEQ ID NO: 11864 - DNA, 40 bp, synthetic construct; identical to SEQ ID NO: 9530
  misc_feature 1..40: note = Description of Artificial Sequence: Synthetic oligonucleotide
  source 1..40: mol_type = other DNA

SEQ ID NO: 11865 - skipped

SEQ ID NO: 11866 - DNA, 42 bp, synthetic construct; identical to SEQ ID NO: 9552
  misc_feature 1..42: note = Description of Artificial Sequence: Synthetic oligonucleotide
  source 1..42: mol_type = other DNA

SEQ ID NO: 11867 - DNA, 219 bp, Homo sapiens; identical to SEQ ID NO: 9563
  source 1..219: mol_type = unassigned DNA

SEQ ID NO: 11868 - DNA, 315 bp, Homo sapiens; identical to SEQ ID NO: 9564
  source 1..315: mol_type = unassigned DNA

SEQ ID NO: 11869 - DNA, 243 bp, Homo sapiens; identical to SEQ ID NO: 9575
  source 1..243: mol_type = unassigned DNA

SEQ ID NO: 11870 - DNA, 233 bp, Homo sapiens; identical to SEQ ID NO: 9586
  source 1..233: mol_type = unassigned DNA

SEQ ID NO: 11871 - DNA, 410 bp, Homo sapiens; identical to SEQ ID NO: 9597
  source 1..410: mol_type = unassigned DNA

SEQ ID NO: 11872 - DNA, 294 bp, Homo sapiens; identical to SEQ ID NO: 9608
  source 1..294: mol_type = unassigned DNA

SEQ ID NO: 11873 - DNA, 463 bp, Homo sapiens; identical to SEQ ID NO: 9619
  source 1..463: mol_type = unassigned DNA

SEQ ID NO: 11874 - DNA, 258 bp, Homo sapiens; identical to SEQ ID NO: 9630
  source 1..258: mol_type = unassigned DNA

SEQ ID NO: 11875 - DNA, 203 bp, Homo sapiens; identical to SEQ ID NO: 9641
  source 1..203: mol_type = unassigned DNA

SEQ ID NO: 11876 - DNA, 523 bp, Homo sapiens; identical to SEQ ID NO: 9652
  source 1..523: mol_type = unassigned DNA

SEQ ID NO: 11877 - DNA, 301 bp, Homo sapiens; identical to SEQ ID NO: 9660
  source 1..301: mol_type = unassigned DNA

SEQ ID NO: 11878 - DNA, 223 bp, Homo sapiens; identical to SEQ ID NO: 9661
  source 1..223: mol_type = unassigned DNA

SEQ ID NO: 11879 - DNA, 720 bp, Homo sapiens; identical to SEQ ID NO: 9662
  source 1..720: mol_type = unassigned DNA

SEQ ID NO: 11880 - DNA, 1683 bp, Homo sapiens; identical to SEQ ID NO: 9663
  source 1..1683: mol_type = unassigned DNA

SEQ ID NO: 11881 - DNA, 233 bp, Homo sapiens; identical to SEQ ID NO: 9664
  source 1..233: mol_type = unassigned DNA

SEQ ID NO: 11882 - DNA, 213 bp, Homo sapiens; identical to SEQ ID NO: 9665
  source 1..213: mol_type = unassigned DNA

SEQ ID NO: 11883 - DNA, 236 bp, Homo sapiens; identical to SEQ ID NO: 9666
  source 1..236: mol_type = unassigned DNA

SEQ ID NO: 11884 - DNA, 233 bp, Homo sapiens; identical to SEQ ID NO: 9667
  source 1..233: mol_type = unassigned DNA

SEQ ID NO: 11885 - DNA, 737 bp, Homo sapiens; identical to SEQ ID NO: 9668
  source 1..737: mol_type = unassigned DNA

SEQ ID NO: 11886 - DNA, 308 bp, Homo sapiens; identical to SEQ ID NO: 9669
  source 1..308: mol_type = unassigned DNA

SEQ ID NO: 11887 - DNA, 1100 bp, Homo sapiens; identical to SEQ ID NO: 9670
  source 1..1100: mol_type = unassigned DNA

SEQ ID NO: 11888 - DNA, 214 bp, Homo sapiens; identical to SEQ ID NO: 9671
  source 1..214: mol_type = unassigned DNA

SEQ ID NO: 11889 - DNA, 582 bp, Homo sapiens; identical to SEQ ID NO: 9672
  source 1..582: mol_type = unassigned DNA

SEQ ID NO: 11890 - DNA, 203 bp, Homo sapiens; identical to SEQ ID NO: 9673
  source 1..203: mol_type = unassigned DNA

SEQ ID NO: 11891 - DNA, 823 bp, Homo sapiens; identical to SEQ ID NO: 9674
  source 1..823: mol_type = unassigned DNA

SEQ ID NO: 11892 - DNA, 293 bp, Homo sapiens; identical to SEQ ID NO: 9675
  source 1..293: mol_type = unassigned DNA

SEQ ID NO: 11893 - DNA, 262 bp, Homo sapiens; identical to SEQ ID NO: 9676
  source 1..262: mol_type = unassigned DNA

SEQ ID NO: 11894 - DNA, 240 bp, Homo sapiens; identical to SEQ ID NO: 9677
  source 1..240: mol_type = unassigned DNA

SEQ ID NO: 11895 - DNA, 1240 bp, Homo sapiens; identical to SEQ ID NO: 9678
  source 1..1240: mol_type = unassigned DNA

SEQ ID NO: 11896 - DNA, 222 bp, Homo sapiens; identical to SEQ ID NO: 9679
  source 1..222: mol_type = unassigned DNA

SEQ ID NO: 11897 - DNA, 714 bp, Homo sapiens; identical to SEQ ID NO: 9680
  source 1..714: mol_type = unassigned DNA

SEQ ID NO: 11898 - DNA, 1216 bp, Homo sapiens; identical to SEQ ID NO: 9681
  source 1..1216: mol_type = unassigned DNA

SEQ ID NO: 11899 - DNA, 207 bp, Homo sapiens; identical to SEQ ID NO: 9682
  source 1..207: mol_type = unassigned DNA

SEQ ID NO: 11900 - DNA, 253 bp, Homo sapiens; identical to SEQ ID NO: 9683
  source 1..253: mol_type = unassigned DNA

SEQ ID NO: 11901 - DNA, 209 bp, Homo sapiens; identical to SEQ ID NO: 9684
  source 1..209: mol_type = unassigned DNA

SEQ ID NO: 11902 - DNA, 225 bp, Homo sapiens; identical to SEQ ID NO: 9685
  source 1..225: mol_type = unassigned DNA

SEQ ID NO: 11903 - DNA, 1133 bp, Homo sapiens; identical to SEQ ID NO: 9686
  source 1..1133: mol_type = unassigned DNA

SEQ ID NO: 11904 - DNA, 478 bp, Homo sapiens; identical to SEQ ID NO: 9687
  source 1..478: mol_type = unassigned DNA

SEQ ID NO: 11905 - DNA, 201 bp, Homo sapiens; identical to SEQ ID NO: 9688
  source 1..201: mol_type = unassigned DNA

SEQ ID NO: 11906 - DNA, 208 bp, Homo sapiens; identical to SEQ ID NO: 9689
  source 1..208: mol_type = unassigned DNA

SEQ ID NO: 11907 - DNA, 210 bp, Homo sapiens; identical to SEQ ID NO: 9690
  source 1..210: mol_type = unassigned DNA

SEQ ID NO: 11908 - DNA, 229 bp, Homo sapiens; identical to SEQ ID NO: 9691
  source 1..229: mol_type = unassigned DNA

SEQ ID NO: 11909 - DNA, 209 bp, Homo sapiens; identical to SEQ ID NO: 9692
  source 1..209: mol_type = unassigned DNA

SEQ ID NO: 11910 - DNA, 255 bp, Homo sapiens; identical to SEQ ID NO: 9693
  source 1..255: mol_type = unassigned DNA

SEQ ID NO: 11911 - DNA, 297 bp, Homo sapiens; identical to SEQ ID NO: 9694
  source 1..297: mol_type = unassigned DNA

SEQ ID NO: 11912 - DNA, 232 bp, Homo sapiens; identical to SEQ ID NO: 9695
  source 1..232: mol_type = unassigned DNA

SEQ ID NO: 11913 - DNA, 247 bp, Homo sapiens; identical to SEQ ID NO: 9696
  source 1..247: mol_type = unassigned DNA

SEQ ID NO: 11914 - DNA, 241 bp, Homo sapiens; identical to SEQ ID NO: 9705
  source 1..241: mol_type = unassigned DNA

SEQ ID NO: 11915 - DNA, 239 bp, Homo sapiens; identical to SEQ ID NO: 9716
  source 1..239: mol_type = unassigned DNA

SEQ ID NO: 11916 - DNA, 201 bp, Homo sapiens; identical to SEQ ID NO: 9727
  source 1..201: mol_type = unassigned DNA

SEQ ID NO: 11917 - DNA, 241 bp, Homo sapiens; identical to SEQ ID NO: 9738
  source 1..241: mol_type = unassigned DNA

SEQ ID NO: 11918 - DNA, 219 bp, Homo sapiens; identical to SEQ ID NO: 9749
  source 1..219: mol_type = unassigned DNA

SEQ ID NO: 11919 - DNA, 315 bp, Homo sapiens; identical to SEQ ID NO: 9750
  source 1..315: mol_type = unassigned DNA

SEQ ID NO: 11920 - DNA, 243 bp, Homo sapiens; identical to SEQ ID NO: 9761
  source 1..243: mol_type = unassigned DNA

SEQ ID NO: 11921 - DNA, 233 bp, Homo sapiens; identical to SEQ ID NO: 9772
  source 1..233: mol_type = unassigned DNA

SEQ ID NO: 11922 - DNA, 410 bp, Homo sapiens; identical to SEQ ID NO: 9783
  source 1..410: mol_type = unassigned DNA

SEQ ID NO: 11923 - DNA, 294 bp, Homo sapiens; identical to SEQ ID NO: 9794
  source 1..294: mol_type = unassigned DNA

SEQ ID NO: 11924 - DNA, 463 bp, Homo sapiens; identical to SEQ ID NO: 9805
  source 1..463: mol_type = unassigned DNA

SEQ ID NO: 11925 - DNA, 258 bp, Homo sapiens; identical to SEQ ID NO: 9816
  source 1..258: mol_type = unassigned DNA

SEQ ID NO: 11926 - DNA, 203 bp, Homo sapiens; identical to SEQ ID NO: 9827
  source 1..203: mol_type = unassigned DNA

SEQ ID NO: 11927 - DNA, 523 bp, Homo sapiens; identical to SEQ ID NO: 9838
  source 1..523: mol_type = unassigned DNA

SEQ ID NO: 11928 - DNA, 301 bp, Homo sapiens; identical to SEQ ID NO: 9846
  source 1..301: mol_type = unassigned DNA

SEQ ID NO: 11929 - DNA, 223 bp, Homo sapiens; identical to SEQ ID NO: 9847
  source 1..223: mol_type = unassigned DNA

SEQ ID NO: 11930 - DNA, 720 bp, Homo sapiens; identical to SEQ ID NO: 9848
  source 1..720: mol_type = unassigned DNA

SEQ ID NO: 11931 - DNA, 1683 bp, Homo sapiens; identical to SEQ ID NO: 9849
  source 1..1683: mol_type = unassigned DNA

SEQ ID NO: 11932 - DNA, 233 bp, Homo sapiens; identical to SEQ ID NO: 9850
  source 1..233: mol_type = unassigned DNA

SEQ ID NO: 11933 - DNA, 213 bp, Homo sapiens; identical to SEQ ID NO: 9851
  source 1..213: mol_type = unassigned DNA

SEQ ID NO: 11934 - DNA, 236 bp, Homo sapiens; identical to SEQ ID NO: 9852
  source 1..236: mol_type = unassigned DNA

SEQ ID NO: 11935 - DNA, 233 bp, Homo sapiens; identical to SEQ ID NO: 9853
  source 1..233: mol_type = unassigned DNA

SEQ ID NO: 11936 - DNA, 737 bp, Homo sapiens; identical to SEQ ID NO: 9854
  source 1..737: mol_type = unassigned DNA

SEQ ID NO: 11937 - DNA, 308 bp, Homo sapiens; identical to SEQ ID NO: 9855
  source 1..308: mol_type = unassigned DNA

SEQ ID NO: 11938 - DNA, 1100 bp, Homo sapiens; identical to SEQ ID NO: 9856
  source 1..1100: mol_type = unassigned DNA

SEQ ID NO: 11939 - DNA, 214 bp, Homo sapiens; identical to SEQ ID NO: 9857
  source 1..214: mol_type = unassigned DNA

SEQ ID NO: 11940 - DNA, 582 bp, Homo sapiens; identical to SEQ ID NO: 9858
  source 1..582: mol_type = unassigned DNA

SEQ ID NO: 11941 - DNA, 203 bp, Homo sapiens; identical to SEQ ID NO: 9859
  source 1..203: mol_type = unassigned DNA

SEQ ID NO: 11942 - DNA, 823 bp, Homo sapiens; identical to SEQ ID NO: 9860
  source 1..823: mol_type = unassigned DNA

SEQ ID NO: 11943 - DNA, 293 bp, Homo sapiens; identical to SEQ ID NO: 9861
  source 1..293: mol_type = unassigned DNA

SEQ ID NO: 11944 - DNA, 262 bp, Homo sapiens; identical to SEQ ID NO: 9862
  source 1..262: mol_type = unassigned DNA

SEQ ID NO: 11945 - DNA, 240 bp, Homo sapiens; identical to SEQ ID NO: 9863
  source 1..240: mol_type = unassigned DNA

SEQ ID NO: 11946 - DNA, 1240 bp, Homo sapiens; identical to SEQ ID NO: 9864
  source 1..1240: mol_type = unassigned DNA

SEQ ID NO: 11947 - DNA, 222 bp, Homo sapiens; identical to SEQ ID NO: 9865
  source 1..222: mol_type = unassigned DNA

SEQ ID NO: 11948 - DNA, 714 bp, Homo sapiens; identical to SEQ ID NO: 9866
  source 1..714: mol_type = unassigned DNA

SEQ ID NO: 11949 - DNA, 1216 bp, Homo sapiens; identical to SEQ ID NO: 9867
  source 1..1216: mol_type = unassigned DNA

SEQ ID NO: 11950 - DNA, 207 bp, Homo sapiens; identical to SEQ ID NO: 9868
  source 1..207: mol_type = unassigned DNA

SEQ ID NO: 11951 - DNA, 253 bp, Homo sapiens; identical to SEQ ID NO: 9869
  source 1..253: mol_type = unassigned DNA

SEQ ID NO: 11952 - DNA, 209 bp, Homo sapiens; identical to SEQ ID NO: 9870
  source 1..209: mol_type = unassigned DNA

SEQ ID NO: 11953 - DNA, 225 bp, Homo sapiens; identical to SEQ ID NO: 9871
  source 1..225: mol_type = unassigned DNA

SEQ ID NO: 11954 - DNA, 1133 bp, Homo sapiens; identical to SEQ ID NO: 9872
  source 1..1133: mol_type = unassigned DNA

SEQ ID NO: 11955 - DNA, 478 bp, Homo sapiens; identical to SEQ ID NO: 9873
  source 1..478: mol_type = unassigned DNA

SEQ ID NO: 11956 - DNA, 201 bp, Homo sapiens; identical to SEQ ID NO: 9874
  source 1..201: mol_type = unassigned DNA

SEQ ID NO: 11957 - DNA, 208 bp, Homo sapiens; identical to SEQ ID NO: 9875
  source 1..208: mol_type = unassigned DNA

SEQ ID NO: 11958 - DNA, 210 bp, Homo sapiens; identical to SEQ ID NO: 9876
  source 1..210: mol_type = unassigned DNA

SEQ ID NO: 11959 - DNA, 229 bp, Homo sapiens; identical to SEQ ID NO: 9877
  source 1..229: mol_type = unassigned DNA

SEQ ID NO: 11960 - DNA, 209 bp, Homo sapiens; identical to SEQ ID NO: 9878
  source 1..209: mol_type = unassigned DNA

SEQ ID NO: 11961 - DNA, 255 bp, Homo sapiens; identical to SEQ ID NO: 9879
  source 1..255: mol_type = unassigned DNA

SEQ ID NO: 11962 - DNA, 297 bp, Homo sapiens; identical to SEQ ID NO: 9880
  source 1..297: mol_type = unassigned DNA

SEQ ID NO: 11963 - DNA, 232 bp, Homo sapiens; identical to SEQ ID NO: 9881
  source 1..232: mol_type = unassigned DNA

SEQ ID NO: 11964 - DNA, 247 bp, Homo sapiens; identical to SEQ ID NO: 9882
  source 1..247: mol_type = unassigned DNA

SEQ ID NO: 11965 - DNA, 241 bp, Homo sapiens; identical to SEQ ID NO: 9891
  source 1..241: mol_type = unassigned DNA

SEQ ID NO: 11966 - DNA, 239 bp, Homo sapiens; identical to SEQ ID NO: 9902
  source 1..239: mol_type = unassigned DNA

SEQ ID NO: 11967 - DNA, 201 bp, Homo sapiens; identical to SEQ ID NO: 9913
  source 1..201: mol_type = unassigned DNA

SEQ ID NO: 11968 - DNA, 241 bp, Homo sapiens; identical to SEQ ID NO: 9924
  source 1..241: mol_type = unassigned DNA

SEQ ID NO: 11969 - DNA, 219 bp, synthetic construct; identical to SEQ ID NO: 9935
  misc_feature 1..219: note = Description of Artificial Sequence: Synthetic polynucleotide
  source 1..219: mol_type = other DNA

SEQ ID NO: 11970 - DNA, 315 bp, synthetic construct; identical to SEQ ID NO: 9936
  misc_feature 1..315: note = Description of Artificial Sequence: Synthetic polynucleotide
  source 1..315: mol_type = other DNA

SEQ ID NO: 11971 - DNA, 243 bp, synthetic construct; identical to SEQ ID NO: 9947
  misc_feature 1..243: note = Description of Artificial Sequence: Synthetic polynucleotide
  source 1..243: mol_type = other DNA

SEQ ID NO: 11972 - DNA, 233 bp, synthetic construct; identical to SEQ ID NO: 9958
  misc_feature 1..233: note = Description of Artificial Sequence: Synthetic polynucleotide
  source 1..233: mol_type = other DNA

SEQ ID NO: 11973 - DNA, 410 bp, synthetic construct; identical to SEQ ID NO: 9969
  misc_feature 1..410: note = Description of Artificial Sequence: Synthetic polynucleotide
  source 1..410: mol_type = other DNA

SEQ ID NO: 11974 - DNA, 294 bp, synthetic construct; identical to SEQ ID NO: 9980
  misc_feature 1..294: note = Description of Artificial Sequence: Synthetic polynucleotide
  source 1..294: mol_type = other DNA

SEQ ID NO: 11975 - DNA, 463 bp, synthetic construct; identical to SEQ ID NO: 9991
  misc_feature 1..463: note = Description of Artificial Sequence: Synthetic polynucleotide
  source 1..463: mol_type = other DNA

SEQ ID NO: 11976 - DNA, 258 bp, synthetic construct; identical to SEQ ID NO: 10002
  misc_feature 1..258: note = Description of Artificial Sequence: Synthetic polynucleotide
  source 1..258: mol_type = other DNA

SEQ ID NO: 11977 - DNA, 203 bp, synthetic construct; identical to SEQ ID NO: 10013
  misc_feature 1..203: note = Description of Artificial Sequence: Synthetic polynucleotide
  source 1..203: mol_type = other DNA

SEQ ID NO: 11978 - DNA, 523 bp, synthetic construct; identical to SEQ ID NO: 10024
  misc_feature 1..523: note = Description of Artificial Sequence: Synthetic polynucleotide
  source 1..523: mol_type = other DNA

SEQ ID NO: 11979 - DNA, 301 bp, synthetic construct; identical to SEQ ID NO: 10032
  misc_feature 1..301: note = Description of Artificial Sequence: Synthetic polynucleotide
  source 1..301: mol_type = other DNA

SEQ ID NO: 11980 - DNA, 223 bp, synthetic construct; identical to SEQ ID NO: 10033
  misc_feature 1..223: note = Description of Artificial Sequence: Synthetic polynucleotide
  source 1..223: mol_type = other DNA

SEQ ID NO: 11981 - DNA, 720 bp, synthetic construct; identical to SEQ ID NO: 10034
  misc_feature 1..720: note = Description of Artificial Sequence: Synthetic polynucleotide
  source 1..720: mol_type = other DNA

SEQ ID NO: 11982 - DNA, 1683 bp, synthetic construct; identical to SEQ ID NO: 10035
  misc_feature 1..1683: note = Description of Artificial Sequence: Synthetic polynucleotide
  source 1..1683: mol_type = other DNA

SEQ ID NO: 11983 - DNA, 233 bp, synthetic construct; identical to SEQ ID NO: 10036
  misc_feature 1..233: note = Description of Artificial Sequence: Synthetic polynucleotide
  source 1..233: mol_type = other DNA

SEQ ID NO: 11984 - DNA, 213 bp, synthetic construct; identical to SEQ ID NO: 10037
  misc_feature 1..213: note = Description of Artificial Sequence: Synthetic polynucleotide
  source 1..213: mol_type = other DNA

SEQ ID NO: 11985 - DNA, 236 bp, synthetic construct; identical to SEQ ID NO: 10038
  misc_feature 1..236: note = Description of Artificial Sequence: Synthetic polynucleotide
  source 1..236: mol_type = other DNA

SEQ ID NO: 11986 - DNA, 233 bp, synthetic construct; identical to SEQ ID NO: 10039
  misc_feature 1..233: note = Description of Artificial Sequence: Synthetic polynucleotide
  source 1..233: mol_type = other DNA

SEQ ID NO: 11987 - DNA, 737 bp, synthetic construct; identical to SEQ ID NO: 10040
  misc_feature 1..737: note = Description of Artificial Sequence: Synthetic polynucleotide
  source 1..737: mol_type = other DNA

SEQ ID NO: 11988 - DNA, 308 bp, synthetic construct; identical to SEQ ID NO: 10041
  misc_feature 1..308: note = Description of Artificial Sequence: Synthetic polynucleotide
  source 1..308: mol_type = other DNA

SEQ ID NO: 11989 - DNA, 1100 bp, synthetic construct; identical to SEQ ID NO: 10042
  misc_feature 1..1100: note = Description of Artificial Sequence: Synthetic polynucleotide
  source 1..1100: mol_type = other DNA

SEQ ID NO: 11990 - DNA, 214 bp, synthetic construct; identical to SEQ ID NO: 10043
  misc_feature 1..214: note = Description of Artificial Sequence: Synthetic polynucleotide
  source 1..214: mol_type = other DNA

SEQ ID NO: 11991 - DNA, 582 bp, synthetic construct; identical to SEQ ID NO: 10044
  misc_feature 1..582: note = Description of Artificial Sequence: Synthetic polynucleotide
  source 1..582: mol_type = other DNA

SEQ ID NO: 11992 - DNA, 203 bp, synthetic construct; identical to SEQ ID NO: 10045
  misc_feature 1..203: note = Description of Artificial Sequence: Synthetic polynucleotide
  source 1..203: mol_type = other DNA

SEQ ID NO: 11993 - DNA, 823 bp, synthetic construct; identical to SEQ ID NO: 10046
  misc_feature 1..823: note = Description of Artificial Sequence: Synthetic polynucleotide
  source 1..823: mol_type = other DNA

SEQ ID NO: 11994 - DNA, 293 bp, synthetic construct; identical to SEQ ID NO: 10047
  misc_feature 1..293: note = Description of Artificial Sequence: Synthetic polynucleotide
  source 1..293: mol_type = other DNA

SEQ ID NO: 11995 - DNA, 262 bp, synthetic construct; identical to SEQ ID NO: 10048
  misc_feature 1..262: note = Description of Artificial Sequence: Synthetic polynucleotide
  source 1..262: mol_type = other DNA

SEQ ID NO: 11996 - DNA, 240 bp, synthetic construct; identical to SEQ ID NO: 10049
  misc_feature 1..240: note = Description of Artificial Sequence: Synthetic polynucleotide
  source 1..240: mol_type = other DNA

SEQ ID NO: 11997 - DNA, 1240 bp, synthetic construct; identical to SEQ ID NO: 10050
  misc_feature 1..1240: note = Description of Artificial Sequence: Synthetic polynucleotide
  source 1..1240: mol_type = other DNA

SEQ ID NO: 11998 - DNA, 222 bp, synthetic construct; identical to SEQ ID NO: 10051
  misc_feature 1..222: note = Description of Artificial Sequence: Synthetic polynucleotide
  source 1..222: mol_type = other DNA

SEQ ID NO: 11999 - DNA, 714 bp, synthetic construct; identical to SEQ ID NO: 10052
  misc_feature 1..714: note = Description of Artificial Sequence: Synthetic polynucleotide
  source 1..714: mol_type = other DNA

SEQ ID NO: 12000 - DNA, 1216 bp, synthetic construct; identical to SEQ ID NO: 10053
  misc_feature 1..1216: note = Description of Artificial Sequence: Synthetic polynucleotide
  source 1..1216: mol_type = other DNA

SEQ ID NO: 12001 - DNA, 207 bp, synthetic construct; identical to SEQ ID NO: 10054
  misc_feature 1..207: note = Description of Artificial Sequence: Synthetic polynucleotide
  source 1..207: mol_type = other DNA

SEQ ID NO: 12002 - DNA, 253 bp, synthetic construct; identical to SEQ ID NO: 10055
  misc_feature 1..253: note = Description of Artificial Sequence: Synthetic polynucleotide
  source 1..253: mol_type = other DNA

SEQ ID NO: 12003 - DNA, 209 bp, synthetic construct; identical to SEQ ID NO: 10056
  misc_feature 1..209: note = Description of Artificial Sequence: Synthetic polynucleotide
  source 1..209: mol_type = other DNA

SEQ ID NO: 12004 - DNA, 225 bp, synthetic construct; identical to SEQ ID NO: 10057
  misc_feature 1..225: note = Description of Artificial Sequence: Synthetic polynucleotide
  source 1..225: mol_type = other DNA

SEQ ID NO: 12005 - DNA, 1133 bp, synthetic construct; identical to SEQ ID NO: 10058
  misc_feature 1..1133: note = Description of Artificial Sequence: Synthetic polynucleotide
  source 1..1133: mol_type = other DNA

SEQ ID NO: 12006 - DNA, 478 bp, synthetic construct; identical to SEQ ID NO: 10059
  misc_feature 1..478: note = Description of Artificial Sequence: Synthetic polynucleotide
  source 1..478: mol_type = other DNA

SEQ ID NO: 12007 - DNA, 201 bp, synthetic construct; identical to SEQ ID NO: 10060
  misc_feature 1..201: note = Description of Artificial Sequence: Synthetic polynucleotide
  source 1..201: mol_type = other DNA

SEQ ID NO: 12008 - DNA, 208 bp, synthetic construct; identical to SEQ ID NO: 10061
  misc_feature 1..208: note = Description of Artificial Sequence: Synthetic polynucleotide
  source 1..208: mol_type = other DNA

SEQ ID NO: 12009 - DNA, 210 bp, synthetic construct; identical to SEQ ID NO: 10062
  misc_feature 1..210: note = Description of Artificial Sequence: Synthetic polynucleotide
  source 1..210: mol_type = other DNA

SEQ ID NO: 12010 - DNA, 229 bp, synthetic construct; identical to SEQ ID NO: 10063
  misc_feature 1..229: note = Description of Artificial Sequence: Synthetic polynucleotide
  source 1..229: mol_type = other DNA

SEQ ID NO: 12011 - DNA, 209 bp, synthetic construct; identical to SEQ ID NO: 10064
  misc_feature 1..209: note = Description of Artificial Sequence: Synthetic polynucleotide
  source 1..209: mol_type = other DNA

SEQ ID NO: 12012 - DNA, 255 bp, synthetic construct; identical to SEQ ID NO: 10065
  misc_feature 1..255: note = Description of Artificial Sequence: Synthetic polynucleotide
  source 1..255: mol_type = other DNA

SEQ ID NO: 12013 - DNA, 297 bp, synthetic construct; identical to SEQ ID NO: 10066
  misc_feature 1..297: note = Description of Artificial Sequence: Synthetic polynucleotide
  source 1..297: mol_type = other DNA

SEQ ID NO: 12014 - DNA, 232 bp, synthetic construct; identical to SEQ ID NO: 10067
  misc_feature 1..232: note = Description of Artificial Sequence: Synthetic polynucleotide
  source 1..232: mol_type = other DNA

SEQ ID NO: 12015 - DNA, 247 bp, synthetic construct; identical to SEQ ID NO: 10068
  misc_feature 1..247: note = Description of Artificial Sequence: Synthetic polynucleotide
  source 1..247: mol_type = other DNA

SEQ ID NO: 12016 - DNA, 241 bp, synthetic construct; identical to SEQ ID NO: 10077
  misc_feature 1..241: note = Description of Artificial Sequence: Synthetic polynucleotide
  source 1..241: mol_type = other DNA

SEQ ID NO: 12017 - DNA, 239 bp, synthetic construct; identical to SEQ ID NO: 10088
  misc_feature 1..239: note = Description of Artificial Sequence: Synthetic polynucleotide
  source 1..239: mol_type = other DNA

SEQ ID NO: 12018 - DNA, 201 bp, synthetic construct; identical to SEQ ID NO: 10099
  misc_feature 1..201: note = Description of Artificial Sequence: Synthetic polynucleotide
  source 1..201: mol_type = other DNA

SEQ ID NO: 12019 - DNA, 241 bp, synthetic construct; identical to SEQ ID NO: 10110
  misc_feature 1..241: note = Description of Artificial Sequence: Synthetic polynucleotide
  source 1..241: mol_type = other DNA

SEQ ID NO: 12020 - DNA, 219 bp, synthetic construct; identical to SEQ ID NO: 10121
  misc_feature 1..219: note = Description of Artificial Sequence: Synthetic polynucleotide
  source 1..219: mol_type = other DNA

SEQ ID NO: 12021 - DNA, 315 bp, synthetic construct; identical to SEQ ID NO: 10122
  misc_feature 1..315: note = Description of Artificial Sequence: Synthetic polynucleotide
  source 1..315: mol_type = other DNA

SEQ ID NO: 12022 - DNA, 243 bp, synthetic construct; identical to SEQ ID NO: 10133
  misc_feature 1..243: note = Description of Artificial Sequence: Synthetic polynucleotide
  source 1..243: mol_type = other DNA

SEQ ID NO: 12023 - DNA, 233 bp, synthetic construct; identical to SEQ ID NO: 10144
  misc_feature 1..233: note = Description of Artificial Sequence: Synthetic polynucleotide
  source 1..233: mol_type = other DNA

SEQ ID NO: 12024 - DNA, 410 bp, synthetic construct; identical to SEQ ID NO: 10155
  misc_feature 1..410: note = Description of Artificial Sequence: Synthetic polynucleotide
  source 1..410: mol_type = other DNA

SEQ ID NO: 12025 - DNA, 294 bp, synthetic construct; identical to SEQ ID NO: 10166
  misc_feature 1..294: note = Description of Artificial Sequence: Synthetic polynucleotide
  source 1..294: mol_type = other DNA

SEQ ID NO: 12026 - DNA, 463 bp, synthetic construct; identical to SEQ ID NO: 10177
  misc_feature 1..463: note = Description of Artificial Sequence: Synthetic polynucleotide
  source 1..463: mol_type = other DNA

SEQ ID NO: 12027 - DNA, 258 bp, synthetic construct; identical to SEQ ID NO: 10188
  misc_feature 1..258: note = Description of Artificial Sequence: Synthetic polynucleotide
  source 1..258: mol_type = other DNA

SEQ ID NO: 12028 - DNA, 203 bp, synthetic construct; identical to SEQ ID NO: 10199
  misc_feature 1..203: note = Description of Artificial Sequence: Synthetic polynucleotide
  source 1..203: mol_type = other DNA

SEQ ID NO: 12029 - DNA, 523 bp, synthetic construct; identical to SEQ ID NO: 10210
  misc_feature 1..523: note = Description of Artificial Sequence: Synthetic polynucleotide
  source 1..523: mol_type = other DNA

SEQ ID NO: 12030 - DNA, 301 bp, synthetic construct; identical to SEQ ID NO: 10218
  misc_feature 1..301: note = Description of Artificial Sequence: Synthetic polynucleotide
  source 1..301: mol_type = other DNA

SEQ ID NO: 12031 - DNA, 223 bp, synthetic construct; identical to SEQ ID NO: 10219
  misc_feature 1..223: note = Description of Artificial Sequence: Synthetic polynucleotide
  source 1..223: mol_type = other DNA

SEQ ID NO: 12032 - DNA, 720 bp, synthetic construct; identical to SEQ ID NO: 10220
  misc_feature 1..720: note = Description of Artificial Sequence: Synthetic polynucleotide
  source 1..720: mol_type = other DNA

SEQ ID NO: 12033 - DNA, 1683 bp, synthetic construct; identical to SEQ ID NO: 10221
  misc_feature 1..1683: note = Description of Artificial Sequence: Synthetic polynucleotide
  source 1..1683: mol_type = other DNA

SEQ ID NO: 12034 - DNA, 233 bp, synthetic construct; identical to SEQ ID NO: 10222
  misc_feature 1..233: note = Description of Artificial Sequence: Synthetic polynucleotide
  source 1..233: mol_type = other DNA

SEQ ID NO: 12035 - DNA, 213 bp, synthetic construct; identical to SEQ ID NO: 10223
  misc_feature 1..213: note = Description of Artificial Sequence: Synthetic polynucleotide
  source 1..213: mol_type = other DNA

SEQ ID NO: 12036 - DNA, 236 bp, synthetic construct; identical to SEQ ID NO: 10224
  misc_feature 1..236: note = Description of Artificial Sequence: Synthetic polynucleotide
  source 1..236: mol_type = other DNA

SEQ ID NO: 12037 - DNA, 233 bp, synthetic construct; identical to SEQ ID NO: 10225
  misc_feature 1..233: note = Description of Artificial Sequence: Synthetic polynucleotide
  source 1..233: mol_type = other DNA

SEQ ID NO: 12038 - DNA, 737 bp, synthetic construct; identical to SEQ ID NO: 10226
  misc_feature 1..737: note = Description of Artificial Sequence: Synthetic polynucleotide
  source 1..737: mol_type = other DNA

SEQ ID NO: 12039 - DNA, 308 bp, synthetic construct; identical to SEQ ID NO: 10227
  misc_feature 1..308: note = Description of Artificial Sequence: Synthetic polynucleotide
  source 1..308: mol_type = other DNA

SEQ ID NO: 12040 - DNA, 1100 bp, synthetic construct; identical to SEQ ID NO: 10228
  misc_feature 1..1100: note = Description of Artificial Sequence: Synthetic polynucleotide
  source 1..1100: mol_type = other DNA

SEQ ID NO: 12041 - DNA, 214 bp, synthetic construct; identical to SEQ ID NO: 10229
  misc_feature 1..214: note = Description of Artificial Sequence: Synthetic polynucleotide
  source 1..214: mol_type = other DNA

SEQ ID NO: 12042 - DNA, 582 bp, synthetic construct; identical to SEQ ID NO: 10230
  misc_feature 1..582: note = Description of Artificial Sequence: Synthetic polynucleotide
  source 1..582: mol_type = other DNA

SEQ ID NO: 12043 - DNA, 203 bp, synthetic construct; identical to SEQ ID NO: 10231
  misc_feature 1..203: note = Description of Artificial Sequence: Synthetic polynucleotide
  source 1..203: mol_type = other DNA

SEQ ID NO: 12044 - DNA, 823 bp, synthetic construct; identical to SEQ ID NO: 10232
  misc_feature 1..823: note = Description of Artificial Sequence: Synthetic polynucleotide
  source 1..823: mol_type = other DNA

SEQ ID NO: 12045 - DNA, 293 bp, synthetic construct; identical to SEQ ID NO: 10233
  misc_feature 1..293: note = Description of Artificial Sequence: Synthetic polynucleotide
  source 1..293: mol_type = other DNA

SEQ ID NO: 12046 - DNA, 262 bp, synthetic construct; identical to SEQ ID NO: 10234
  misc_feature 1..262: note = Description of Artificial Sequence: Synthetic polynucleotide
  source 1..262: mol_type = other DNA

SEQ ID NO: 12047 - DNA, 240 bp, synthetic construct; identical to SEQ ID NO: 10235
  misc_feature 1..240: note = Description of Artificial Sequence: Synthetic polynucleotide
  source 1..240: mol_type = other DNA

SEQ ID NO: 12048 - DNA, 1240 bp, synthetic construct; identical to SEQ ID NO: 10236
  misc_feature 1..1240: note = Description of Artificial Sequence: Synthetic polynucleotide
  source 1..1240: mol_type = other DNA

SEQ ID NO: 12049 - DNA, 222 bp, synthetic construct; identical to SEQ ID NO: 10237
  misc_feature 1..222: note = Description of Artificial Sequence: Synthetic polynucleotide
  source 1..222: mol_type = other DNA

SEQ ID NO: 12050 - DNA, 714 bp, synthetic construct; identical to SEQ ID NO: 10238
  misc_feature 1..714: note = Description of Artificial Sequence: Synthetic polynucleotide
  source 1..714: mol_type = other DNA

SEQ ID NO: 12051 - DNA, 1216 bp, synthetic construct; identical to SEQ ID NO: 10239
  misc_feature 1..1216: note = Description of Artificial Sequence: Synthetic polynucleotide
  source 1..1216: mol_type = other DNA

SEQ ID NO: 12052 - DNA, 207 bp, synthetic construct; identical to SEQ ID NO: 10240
  misc_feature 1..207: note = Description of Artificial Sequence: Synthetic polynucleotide
  source 1..207: mol_type = other DNA

SEQ ID NO: 12053 - DNA, 253 bp, synthetic construct; identical to SEQ ID NO: 10241
  misc_feature 1..253: note = Description of Artificial Sequence: Synthetic polynucleotide
  source 1..253: mol_type = other DNA

SEQ ID NO: 12054 - DNA, 209 bp, synthetic construct; identical to SEQ ID NO: 10242
  misc_feature 1..209: note = Description of Artificial Sequence: Synthetic polynucleotide
  source 1..209: mol_type = other DNA

SEQ ID NO: 12055 - DNA, 225 bp, synthetic construct; identical to SEQ ID NO: 10243
  misc_feature 1..225: note = Description of Artificial Sequence: Synthetic polynucleotide
  source 1..225: mol_type = other DNA

SEQ ID NO: 12056 - DNA, 1133 bp, synthetic construct; identical to SEQ ID NO: 10244
  misc_feature 1..1133: note = Description of Artificial Sequence: Synthetic polynucleotide
  source 1..1133: mol_type = other DNA

SEQ ID NO: 12057 - DNA, 478 bp, synthetic construct; identical to SEQ ID NO: 10245
  misc_feature 1..478: note = Description of Artificial Sequence: Synthetic polynucleotide
  source 1..478: mol_type = other DNA

SEQ ID NO: 12058 - DNA, 201 bp, synthetic construct; identical to SEQ ID NO: 10246
  misc_feature 1..201: note = Description of Artificial Sequence: Synthetic polynucleotide
  source 1..201: mol_type = other DNA

SEQ ID NO: 12059 - DNA, 208 bp, synthetic construct; identical to SEQ ID NO: 10247
  misc_feature 1..208: note = Description of Artificial Sequence: Synthetic polynucleotide
  source 1..208: mol_type = other DNA

SEQ ID NO: 12060 - DNA, 210 bp, synthetic construct; identical to SEQ ID NO: 10248
  misc_feature 1..210: note = Description of Artificial Sequence: Synthetic polynucleotide
  source 1..210: mol_type = other DNA

SEQ ID NO: 12061 - DNA, 229 bp, synthetic construct; identical to SEQ ID NO: 10249
  misc_feature 1..229: note = Description of Artificial Sequence: Synthetic polynucleotide
  source 1..229: mol_type = other DNA

SEQ ID NO: 12062 - DNA, 209 bp, synthetic construct; identical to SEQ ID NO: 10250
  misc_feature 1..209: note = Description of Artificial Sequence: Synthetic polynucleotide
  source 1..209: mol_type = other DNA

SEQ ID NO: 12063 - DNA, 255 bp, synthetic construct; identical to SEQ ID NO: 10251
  misc_feature 1..255: note = Description of Artificial Sequence: Synthetic polynucleotide
  source 1..255: mol_type = other DNA

SEQ ID NO: 12064 - DNA, 297 bp, synthetic construct; identical to SEQ ID NO: 10252
  misc_feature 1..297: note = Description of Artificial Sequence: Synthetic polynucleotide
  source 1..297: mol_type = other DNA

SEQ ID NO: 12065 - DNA, 232 bp, synthetic construct; identical to SEQ ID NO: 10253
  misc_feature 1..232: note = Description of Artificial Sequence: Synthetic polynucleotide
  source 1..232: mol_type = other DNA

SEQ ID NO: 12066 - DNA, 247 bp, synthetic construct; identical to SEQ ID NO: 10254
  misc_feature 1..247: note = Description of Artificial Sequence: Synthetic polynucleotide
  source 1..247: mol_type = other DNA

SEQ ID NO: 12067 - DNA, 241 bp, synthetic construct; identical to SEQ ID NO: 10263
  misc_feature 1..241: note = Description of Artificial Sequence: Synthetic polynucleotide
  source 1..241: mol_type = other DNA

SEQ ID NO: 12068 - DNA, 239 bp, synthetic construct; identical to SEQ ID NO: 10274
  misc_feature 1..239: note = Description of Artificial Sequence: Synthetic polynucleotide
  source 1..239: mol_type = other DNA

SEQ ID NO: 12069 - DNA, 201 bp, synthetic construct; identical to SEQ ID NO: 10285
  misc_feature 1..201: note = Description of Artificial Sequence: Synthetic polynucleotide
  source 1..201: mol_type = other DNA

SEQ ID NO: 12070 - DNA, 241 bp, synthetic construct; identical to SEQ ID NO: 10296
  misc_feature 1..241: note = Description of Artificial Sequence: Synthetic polynucleotide
  source 1..241: mol_type = other DNA

SEQ ID NO: 12071 - DNA, 219 bp, synthetic construct; identical to SEQ ID NO: 10307
  misc_feature 1..219: note = Description of Artificial Sequence: Synthetic polynucleotide
  source 1..219: mol_type = other DNA

SEQ ID NO: 12072 - DNA, 315 bp, synthetic construct; identical to SEQ ID NO: 10308
  misc_feature 1..315: note = Description of Artificial Sequence: Synthetic polynucleotide
  source 1..315: mol_type = other DNA

SEQ ID NO: 12073 - DNA, 243 bp, synthetic construct; identical to SEQ ID NO: 10319
  misc_feature 1..243: note = Description of Artificial Sequence: Synthetic polynucleotide
  source 1..243: mol_type = other DNA

SEQ ID NO: 12074 - DNA, 233 bp, synthetic construct; identical to SEQ ID NO: 10330
  misc_feature 1..233: note = Description of Artificial Sequence: Synthetic polynucleotide
  source 1..233: mol_type = other DNA

SEQ ID NO: 12075 - DNA, 410 bp, synthetic construct; identical to SEQ ID NO: 10341
  misc_feature 1..410: note = Description of Artificial Sequence: Synthetic polynucleotide
  source 1..410: mol_type = other DNA

SEQ ID NO: 12076 - DNA, 294 bp, synthetic construct; identical to SEQ ID NO: 10352
  misc_feature 1..294: note = Description of Artificial Sequence: Synthetic polynucleotide
  source 1..294: mol_type = other DNA

SEQ ID NO: 12077 - DNA, 463 bp, synthetic construct; identical to SEQ ID NO: 10363
  misc_feature 1..463: note = Description of Artificial Sequence: Synthetic polynucleotide
  source 1..463: mol_type = other DNA

SEQ ID NO: 12078 - DNA, 258 bp, synthetic construct; identical to SEQ ID NO: 10374
  misc_feature 1..258: note = Description of Artificial Sequence: Synthetic polynucleotide
  source 1..258: mol_type = other DNA

SEQ ID NO: 12079 - DNA, 203 bp, synthetic construct; identical to SEQ ID NO: 10385
  misc_feature 1..203: note = Description of Artificial Sequence: Synthetic polynucleotide
  source 1..203: mol_type = other DNA

SEQ ID NO: 12080 - DNA, 523 bp, synthetic construct; identical to SEQ ID NO: 10396
  misc_feature 1..523: note = Description of Artificial Sequence: Synthetic polynucleotide
  source 1..523: mol_type = other DNA

SEQ ID NO: 12081 - DNA, 301 bp, synthetic construct; identical to SEQ ID NO: 10404
  misc_feature 1..301: note = Description of Artificial Sequence: Synthetic polynucleotide
  source 1..301: mol_type = other DNA

SEQ ID NO: 12082 - DNA, 223 bp, synthetic construct; identical to SEQ ID NO: 10405
  misc_feature 1..223: note = Description of Artificial Sequence: Synthetic polynucleotide
  source 1..223: mol_type = other DNA

SEQ ID NO: 12083 - DNA, 720 bp, synthetic construct; identical to SEQ ID NO: 10406
  misc_feature 1..720: note = Description of Artificial Sequence: Synthetic polynucleotide
  source 1..720: mol_type = other DNA

SEQ ID NO: 12084 - DNA, 1683 bp, synthetic construct; identical to SEQ ID NO: 10407
  misc_feature 1..1683: note = Description of Artificial Sequence: Synthetic polynucleotide
  source 1..1683: mol_type = other DNA

SEQ ID NO: 12085 - DNA, 233 bp, synthetic construct; identical to SEQ ID NO: 10408
  misc_feature 1..233: note = Description of Artificial Sequence: Synthetic polynucleotide
  source 1..233: mol_type = other DNA

SEQ ID NO: 12086 - DNA, 213 bp, synthetic construct; identical to SEQ ID NO: 10409
  misc_feature 1..213: note = Description of Artificial Sequence: Synthetic polynucleotide
  source 1..213: mol_type = other DNA

SEQ ID NO: 12087 - DNA, 236 bp, synthetic construct; identical to SEQ ID NO: 10410
  misc_feature 1..236: note = Description of Artificial Sequence: Synthetic polynucleotide
  source 1..236: mol_type = other DNA

SEQ ID NO: 12088 - DNA, 233 bp, synthetic construct; identical to SEQ ID NO: 10411
  misc_feature 1..233: note = Description of Artificial Sequence: Synthetic polynucleotide
  source 1..233: mol_type = other DNA

SEQ ID NO: 12089 - DNA, 737 bp, synthetic construct; identical to SEQ ID NO: 10412
  misc_feature 1..737: note = Description of Artificial Sequence: Synthetic polynucleotide
  source 1..737: mol_type = other DNA

SEQ ID NO: 12090 - DNA, 308 bp, synthetic construct; identical to SEQ ID NO: 10413
  misc_feature 1..308: note = Description of Artificial Sequence: Synthetic polynucleotide
  source 1..308: mol_type = other DNA

SEQ ID NO: 12091 - DNA, 1100 bp, synthetic construct; identical to SEQ ID NO: 10414
  misc_feature 1..1100: note = Description of Artificial Sequence: Synthetic polynucleotide
  source 1..1100: mol_type = other DNA

SEQ ID NO: 12092 - DNA, 214 bp, synthetic construct; identical to SEQ ID NO: 10415
  misc_feature 1..214: note = Description of Artificial Sequence: Synthetic polynucleotide
  source 1..214: mol_type = other DNA

SEQ ID NO: 12093 - DNA, 582 bp, synthetic construct; identical to SEQ ID NO: 10416
  misc_feature 1..582: note = Description of Artificial Sequence: Synthetic polynucleotide
  source 1..582: mol_type = other DNA

SEQ ID NO: 12094 - DNA, 203 bp, synthetic construct; identical to SEQ ID NO: 10417
  misc_feature 1..203: note = Description of Artificial Sequence: Synthetic polynucleotide
  source 1..203: mol_type = other DNA

SEQ ID NO: 12095 - DNA, 823 bp, synthetic construct; identical to SEQ ID NO: 10418
  misc_feature 1..823: note = Description of Artificial Sequence: Synthetic polynucleotide
  source 1..823: mol_type = other DNA

SEQ ID NO: 12096 - DNA, 293 bp, synthetic construct; identical to SEQ ID NO: 10419
  misc_feature 1..293: note = Description of Artificial Sequence: Synthetic polynucleotide
  source 1..293: mol_type = other DNA

SEQ ID NO: 12097 - DNA, 262 bp, synthetic construct; identical to SEQ ID NO: 10420
  misc_feature 1..262: note = Description of Artificial Sequence: Synthetic polynucleotide
  source 1..262: mol_type = other DNA

SEQ ID NO: 12098 - DNA, 240 bp, synthetic construct; identical to SEQ ID NO: 10421
  misc_feature 1..240: note = Description of Artificial Sequence: Synthetic polynucleotide
  source 1..240: mol_type = other DNA

SEQ ID NO: 12099 - DNA, 1240 bp, synthetic construct; identical to SEQ ID NO: 10422
  misc_feature 1..1240: note = Description of Artificial Sequence: Synthetic polynucleotide
  source 1..1240: mol_type = other DNA

SEQ ID NO: 12100 - DNA, 222 bp, synthetic construct; identical to SEQ ID NO: 10423
  misc_feature 1..222: note = Description of Artificial Sequence: Synthetic polynucleotide
  source 1..222: mol_type = other DNA

SEQ ID NO: 12101 - DNA, 714 bp, synthetic construct; identical to SEQ ID NO: 10424
  misc_feature 1..714: note = Description of Artificial Sequence: Synthetic polynucleotide
  source 1..714: mol_type = other DNA

SEQ ID NO: 12102 - DNA, 1216 bp, synthetic construct; identical to SEQ ID NO: 10425
  misc_feature 1..1216: note = Description of Artificial Sequence: Synthetic polynucleotide
  source 1..1216: mol_type = other DNA

SEQ ID NO: 12103 - DNA, 207 bp, synthetic construct; identical to SEQ ID NO: 10426
  misc_feature 1..207: note = Description of Artificial Sequence: Synthetic polynucleotide
  source 1..207: mol_type = other DNA

SEQ ID NO: 12104 - DNA, 253 bp, synthetic construct; identical to SEQ ID NO: 10427
  misc_feature 1..253: note = Description of Artificial Sequence: Synthetic polynucleotide
  source 1..253: mol_type = other DNA

SEQ ID NO: 12105 - DNA, 209 bp, synthetic construct; identical to SEQ ID NO: 10428
  misc_feature 1..209: note = Description of Artificial Sequence: Synthetic polynucleotide
  source 1..209: mol_type = other DNA

SEQ ID NO: 12106 - DNA, 225 bp, synthetic construct; identical to SEQ ID NO: 10429
  misc_feature 1..225: note = Description of Artificial Sequence: Synthetic polynucleotide
  source 1..225: mol_type = other DNA

SEQ ID NO: 12107 - DNA, 1133 bp, synthetic construct; identical to SEQ ID NO: 10430
  misc_feature 1..1133: note = Description of Artificial Sequence: Synthetic polynucleotide
  source 1..1133: mol_type = other DNA

SEQ ID NO: 12108 - DNA, 478 bp, synthetic construct; identical to SEQ ID NO: 10431
  misc_feature 1..478: note = Description of Artificial Sequence: Synthetic polynucleotide
  source 1..478: mol_type = other DNA

SEQ ID NO: 12109 - DNA, 201 bp, synthetic construct; identical to SEQ ID NO: 10432
  misc_feature 1..201: note = Description of Artificial Sequence: Synthetic polynucleotide
  source 1..201: mol_type = other DNA

SEQ ID NO: 12110 - DNA, 208 bp, synthetic construct; identical to SEQ ID NO: 10433
  misc_feature 1..208: note = Description of Artificial Sequence: Synthetic polynucleotide
  source 1..208: mol_type = other DNA

SEQ ID NO: 12111 - DNA, 210 bp, synthetic construct; identical to SEQ ID NO: 10434
  misc_feature 1..210: note = Description of Artificial Sequence: Synthetic polynucleotide
  source 1..210: mol_type = other DNA

SEQ ID NO: 12112 - DNA, 229 bp, synthetic construct; identical to SEQ ID NO: 10435
  misc_feature 1..229: note = Description of Artificial Sequence: Synthetic polynucleotide
  source 1..229: mol_type = other DNA

SEQ ID NO: 12113 - DNA, 209 bp, synthetic construct; identical to SEQ ID NO: 10436
  misc_feature 1..209: note = Description of Artificial Sequence: Synthetic polynucleotide
  source 1..209: mol_type = other DNA

SEQ ID NO: 12114 - DNA, 255 bp, synthetic construct; identical to SEQ ID NO: 10437
  misc_feature 1..255: note = Description of Artificial Sequence: Synthetic polynucleotide
  source 1..255: mol_type = other DNA

SEQ ID NO: 12115 - DNA, 297 bp, synthetic construct; identical to SEQ ID NO: 10438
  misc_feature 1..297: note = Description of Artificial Sequence: Synthetic polynucleotide
  source 1..297: mol_type = other DNA

SEQ ID NO: 12116 - DNA, 232 bp, synthetic construct; identical to SEQ ID NO: 10439
  misc_feature 1..232: note = Description of Artificial Sequence: Synthetic polynucleotide
  source 1..232: mol_type = other DNA

SEQ ID NO: 12117 - DNA, 247 bp, synthetic construct; identical to SEQ ID NO: 10440
  misc_feature 1..247: note = Description of Artificial Sequence: Synthetic polynucleotide
  source 1..247: mol_type = other DNA

SEQ ID NO: 12118 - DNA, 241 bp, synthetic construct; identical to SEQ ID NO: 10449
  misc_feature 1..241: note = Description of Artificial Sequence: Synthetic polynucleotide
  source 1..241: mol_type = other DNA

SEQ ID NO: 12119 - DNA, 239 bp, synthetic construct; identical to SEQ ID NO: 10460
  misc_feature 1..239: note = Description of Artificial Sequence: Synthetic polynucleotide
  source 1..239: mol_type = other DNA

SEQ ID NO: 12120 - DNA, 201 bp, synthetic construct; identical to SEQ ID NO: 10471
  misc_feature 1..201: note = Description of Artificial Sequence: Synthetic polynucleotide
  source 1..201: mol_type = other DNA

SEQ ID NO: 12121 - DNA, 241 bp, synthetic construct; identical to SEQ ID NO: 10482
  misc_feature 1..241: note = Description of Artificial Sequence: Synthetic polynucleotide
  source 1..241: mol_type = other DNA

SEQ ID NO: 12122 - DNA, 219 bp, synthetic construct; identical to SEQ ID NO: 10493
  misc_feature 1..219: note = Description of Artificial Sequence: Synthetic polynucleotide
  source 1..219: mol_type = other DNA

SEQ ID NO: 12123 - DNA, 315 bp, synthetic construct; identical to SEQ ID NO: 10494
  misc_feature 1..315: note = Description of Artificial Sequence: Synthetic polynucleotide
  source 1..315: mol_type = other DNA

SEQ ID NO: 12124 - DNA, 243 bp, synthetic construct; identical to SEQ ID NO: 10505
  misc_feature 1..243: note = Description of Artificial Sequence: Synthetic polynucleotide
  source 1..243: mol_type = other DNA

SEQ ID NO: 12125 - DNA, 233 bp, synthetic construct; identical to SEQ ID NO: 10516
  misc_feature 1..233: note = Description of Artificial Sequence: Synthetic polynucleotide
  source 1..233: mol_type = other DNA

SEQ ID NO: 12126 - DNA, 410 bp, synthetic construct; identical to SEQ ID NO: 10527
  misc_feature 1..410: note = Description of Artificial Sequence: Synthetic polynucleotide
  source 1..410: mol_type = other DNA

SEQ ID NO: 12127 - DNA, 294 bp, synthetic construct; identical to SEQ ID NO: 10538
  misc_feature 1..294: note = Description of Artificial Sequence: Synthetic polynucleotide
  source 1..294: mol_type = other DNA

SEQ ID NO: 12128 - DNA, 463 bp, synthetic construct; identical to SEQ ID NO: 10549
  misc_feature 1..463: note = Description of Artificial Sequence: Synthetic polynucleotide
  source 1..463: mol_type = other DNA

SEQ ID NO: 12129 - DNA, 258 bp, synthetic construct; identical to SEQ ID NO: 10560
  misc_feature 1..258: note = Description of Artificial Sequence: Synthetic polynucleotide
  source 1..258: mol_type = other DNA

SEQ ID NO: 12130 - DNA, 203 bp, synthetic construct; identical to SEQ ID NO: 10571
  misc_feature 1..203: note = Description of Artificial Sequence: Synthetic polynucleotide
  source 1..203: mol_type = other DNA

SEQ ID NO: 12131 - DNA, 523 bp, synthetic construct; identical to SEQ ID NO: 10582
  misc_feature 1..523: note = Description of Artificial Sequence: Synthetic polynucleotide
  source 1..523: mol_type = other DNA

SEQ ID NO: 12132 - DNA, 301 bp, synthetic construct; identical to SEQ ID NO: 10590
  misc_feature 1..301: note = Description of Artificial Sequence: Synthetic polynucleotide
  source 1..301: mol_type = other DNA

SEQ ID NO: 12133 - DNA, 223 bp, synthetic construct; identical to SEQ ID NO: 10591
  misc_feature 1..223: note = Description of Artificial Sequence: Synthetic polynucleotide
  source 1..223: mol_type = other DNA

SEQ ID NO: 12134 - DNA, 720 bp, synthetic construct; identical to SEQ ID NO: 10592
  misc_feature 1..720: note = Description of Artificial Sequence: Synthetic polynucleotide
  source 1..720: mol_type = other DNA

SEQ ID NO: 12135 - DNA, 1683 bp, synthetic construct; identical to SEQ ID NO: 10593
  misc_feature 1..1683: note = Description of Artificial Sequence: Synthetic polynucleotide
  source 1..1683: mol_type = other DNA

SEQ ID NO: 12136 - DNA, 233 bp, synthetic construct; identical to SEQ ID NO: 10594
  misc_feature 1..233: note = Description of Artificial Sequence: Synthetic polynucleotide
  source 1..233: mol_type = other DNA

SEQ ID NO: 12137 - DNA, 213 bp, synthetic construct; identical to SEQ ID NO: 10595
  misc_feature 1..213: note = Description of Artificial Sequence: Synthetic polynucleotide
  source 1..213: mol_type = other DNA

SEQ ID NO: 12138 - DNA, 236 bp, synthetic construct; identical to SEQ ID NO: 10596
  misc_feature 1..236: note = Description of Artificial Sequence: Synthetic polynucleotide
  source 1..236: mol_type = other DNA

SEQ ID NO: 12139 - DNA, 233 bp, synthetic construct; identical to SEQ ID NO: 10597
  misc_feature 1..233: note = Description of Artificial Sequence: Synthetic polynucleotide
  source 1..233: mol_type = other DNA

SEQ ID NO: 12140 - DNA, 737 bp, synthetic construct; identical to SEQ ID NO: 10598
  misc_feature 1..737: note = Description of Artificial Sequence: Synthetic polynucleotide
  source 1..737: mol_type = other DNA

SEQ ID NO: 12141 - DNA, 308 bp, synthetic construct; identical to SEQ ID NO: 10599
  misc_feature 1..308: note = Description of Artificial Sequence: Synthetic polynucleotide
  source 1..308: mol_type = other DNA

SEQ ID NO: 12142 - DNA, 1100 bp, synthetic construct; identical to SEQ ID NO: 10600
  misc_feature 1..1100: note = Description of Artificial Sequence: Synthetic polynucleotide
  source 1..1100: mol_type = other DNA

SEQ ID NO: 12143 - DNA, 214 bp, synthetic construct; identical to SEQ ID NO: 10601
  misc_feature 1..214: note = Description of Artificial Sequence: Synthetic polynucleotide
  source 1..214: mol_type = other DNA

SEQ ID NO: 12144 - DNA, 582 bp, synthetic construct; identical to SEQ ID NO: 10602
  misc_feature 1..582: note = Description of Artificial Sequence: Synthetic polynucleotide
  source 1..582: mol_type = other DNA

SEQ ID NO: 12145 - DNA, 203 bp, synthetic construct; identical to SEQ ID NO: 10603
  misc_feature 1..203: note = Description of Artificial Sequence: Synthetic polynucleotide
  source 1..203: mol_type = other DNA

SEQ ID NO: 12146 - DNA, 823 bp, synthetic construct; identical to SEQ ID NO: 10604
  misc_feature 1..823: note = Description of Artificial Sequence: Synthetic polynucleotide
  source 1..823: mol_type = other DNA

SEQ ID NO: 12147 - DNA, 293 bp, synthetic construct; identical to SEQ ID NO: 10605
  misc_feature 1..293: note = Description of Artificial Sequence: Synthetic polynucleotide
  source 1..293: mol_type = other DNA

SEQ ID NO: 12148 - DNA, 262 bp, synthetic construct; identical to SEQ ID NO: 10606
  misc_feature 1..262: note = Description of Artificial Sequence: Synthetic polynucleotide
  source 1..262: mol_type = other DNA

SEQ ID NO: 12149 - DNA, 240 bp, synthetic construct; identical to SEQ ID NO: 10607
  misc_feature 1..240: note = Description of Artificial Sequence: Synthetic polynucleotide
  source 1..240: mol_type = other DNA

SEQ ID NO: 12150 - DNA, 1240 bp, synthetic construct; identical to SEQ ID NO: 10608
  misc_feature 1..1240: note = Description of Artificial Sequence: Synthetic polynucleotide
  source 1..1240: mol_type = other DNA

SEQ ID NO: 12151 - DNA, 222 bp, synthetic construct; identical to SEQ ID NO: 10609
  misc_feature 1..222: note = Description of Artificial Sequence: Synthetic polynucleotide
  source 1..222: mol_type = other DNA

SEQ ID NO: 12152 - DNA, 714 bp, synthetic construct; identical to SEQ ID NO: 10610
  misc_feature 1..714: note = Description of Artificial Sequence: Synthetic polynucleotide
  source 1..714: mol_type = other DNA

SEQ ID NO: 12153 - DNA, 1216 bp, synthetic construct; identical to SEQ ID NO: 10611
  misc_feature 1..1216: note = Description of Artificial Sequence: Synthetic polynucleotide
  source 1..1216: mol_type = other DNA

SEQ ID NO: 12154 - DNA, 207 bp, synthetic construct; identical to SEQ ID NO: 10612
  misc_feature 1..207: note = Description of Artificial Sequence: Synthetic polynucleotide
  source 1..207: mol_type = other DNA

SEQ ID NO: 12155 - DNA, 253 bp, synthetic construct; identical to SEQ ID NO: 10613
  misc_feature 1..253: note = Description of Artificial Sequence: Synthetic polynucleotide
  source 1..253: mol_type = other DNA

SEQ ID NO: 12156 - DNA, 209 bp, synthetic construct; identical to SEQ ID NO: 10614
  misc_feature 1..209: note = Description of Artificial Sequence: Synthetic polynucleotide
  source 1..209: mol_type = other DNA

SEQ ID NO: 12157 - DNA, 225 bp, synthetic construct; identical to SEQ ID NO: 10615
  misc_feature 1..225: note = Description of Artificial Sequence: Synthetic polynucleotide
  source 1..225: mol_type = other DNA

SEQ ID NO: 12158 - DNA, 1133 bp, synthetic construct; identical to SEQ ID NO: 10616
  misc_feature 1..1133: note = Description of Artificial Sequence: Synthetic polynucleotide
  source 1..1133: mol_type = other DNA

SEQ ID NO: 12159 - DNA, 478 bp, synthetic construct; identical to SEQ ID NO: 10617
  misc_feature 1..478: note = Description of Artificial Sequence: Synthetic polynucleotide
  source 1..478: mol_type = other DNA

SEQ ID NO: 12160 - DNA, 201 bp, synthetic construct; identical to SEQ ID NO: 10618
  misc_feature 1..201: note = Description of Artificial Sequence: Synthetic polynucleotide
  source 1..201: mol_type = other DNA

SEQ ID NO: 12161 - DNA, 208 bp, synthetic construct; identical to SEQ ID NO: 10619
  misc_feature 1..208: note = Description of Artificial Sequence: Synthetic polynucleotide
  source 1..208: mol_type = other DNA

SEQ ID NO: 12162 - DNA, 210 bp, synthetic construct; identical to SEQ ID NO: 10620
  misc_feature 1..210: note = Description of Artificial Sequence: Synthetic polynucleotide
  source 1..210: mol_type = other DNA

SEQ ID NO: 12163 - DNA, 229 bp, synthetic construct; identical to SEQ ID NO: 10621
  misc_feature 1..229: note = Description of Artificial Sequence: Synthetic polynucleotide
  source 1..229: mol_type = other DNA

SEQ ID NO: 12164 - DNA, 209 bp, synthetic construct; identical to SEQ ID NO: 10622
  misc_feature 1..209: note = Description of Artificial Sequence: Synthetic polynucleotide
  source 1..209: mol_type = other DNA

SEQ ID NO: 12165 - DNA, 255 bp, synthetic construct; identical to SEQ ID NO: 10623
  misc_feature 1..255: note = Description of Artificial Sequence: Synthetic polynucleotide
  source 1..255: mol_type = other DNA

SEQ ID NO: 12166 - DNA, 297 bp, synthetic construct; identical to SEQ ID NO: 10624
  misc_feature 1..297: note = Description of Artificial Sequence: Synthetic polynucleotide
  source 1..297: mol_type = other DNA

SEQ ID NO: 12167 - DNA, 232 bp, synthetic construct; identical to SEQ ID NO: 10625
  misc_feature 1..232: note = Description of Artificial Sequence: Synthetic polynucleotide
  source 1..232: mol_type = other DNA

SEQ ID NO: 12168 - DNA, 247 bp, synthetic construct; identical to SEQ ID NO: 10626
  misc_feature 1..247: note = Description of Artificial Sequence: Synthetic polynucleotide
  source 1..247: mol_type = other DNA

SEQ ID NO: 12169 - DNA, 241 bp, synthetic construct; identical to SEQ ID NO: 10635
  misc_feature 1..241: note = Description of Artificial Sequence: Synthetic polynucleotide
  source 1..241: mol_type = other DNA

SEQ ID NO: 12170 - DNA, 239 bp, synthetic construct; identical to SEQ ID NO: 10646
  misc_feature 1..239: note = Description of Artificial Sequence: Synthetic polynucleotide
  source 1..239: mol_type = other DNA

SEQ ID NO: 12171 - DNA, 201 bp, synthetic construct; identical to SEQ ID NO: 10657
  misc_feature 1..201: note = Description of Artificial Sequence: Synthetic polynucleotide
  source 1..201: mol_type = other DNA

SEQ ID NO: 12172 - DNA, 241 bp, synthetic construct; identical to SEQ ID NO: 10668
  misc_feature 1..241: note = Description of Artificial Sequence: Synthetic polynucleotide
  source 1..241: mol_type = other DNA

SEQ ID NO: 12173 - DNA, 848 bp, Homo sapiens; identical to SEQ ID NO: 10679
  source 1..848: mol_type = unassigned DNA

SEQ ID NO: 12174 - DNA, 1230 bp, Homo sapiens; identical to SEQ ID NO: 10680
  source 1..1230: mol_type = unassigned DNA

SEQ ID NO: 12175 - DNA, 2172 bp, Homo sapiens; identical to SEQ ID NO: 10695
  source 1..2172: mol_type = unassigned DNA

SEQ ID NO: 12176 - DNA, 338 bp, Homo sapiens; identical to SEQ ID NO: 10703
  source 1..338: mol_type = unassigned DNA

SEQ ID NO: 12177 - DNA, 5715 bp, Homo sapiens; identical to SEQ ID NO: 10711
  source 1..5715: mol_type = unassigned DNA

SEQ ID NO: 12178 - DNA, 1059 bp, Homo sapiens; identical to SEQ ID NO: 10717
  source 1..1059: mol_type = unassigned DNA

SEQ ID NO: 12179 - DNA, 1503 bp, Homo sapiens; identical to SEQ ID NO: 10725
  source 1..1503: mol_type = unassigned DNA

SEQ ID NO: 12180 - DNA, 1437 bp, Homo sapiens; identical to SEQ ID NO: 10734
  source 1..1437: mol_type = unassigned DNA

SEQ ID NO: 12181 - DNA, 1203 bp, Homo sapiens; identical to SEQ ID NO: 10743
  source 1..1203: mol_type = unassigned DNA

SEQ ID NO: 12182 - DNA, 206 bp, Homo sapiens; identical to SEQ ID NO: 10749
  source 1..206: mol_type = unassigned DNA

SEQ ID NO: 12183 - DNA, 1141 bp, Homo sapiens; identical to SEQ ID NO: 10750
  source 1..1141: mol_type = unassigned DNA

SEQ ID NO: 12184 - DNA, 1819 bp, Homo sapiens; identical to SEQ ID NO: 10751
  source 1..1819: mol_type = unassigned DNA

SEQ ID NO: 12185 - DNA, 1813 bp, Homo sapiens; identical to SEQ ID NO: 10752
  source 1..1813: mol_type = unassigned DNA

SEQ ID NO: 12186 - DNA, 1872 bp, Homo sapiens; identical to SEQ ID NO: 10753
  source 1..1872: mol_type = unassigned DNA

SEQ ID NO: 12187 - DNA, 652 bp, Homo sapiens; identical to SEQ ID NO: 10754
  source 1..652: mol_type = unassigned DNA

SEQ ID NO: 12188 - DNA, 722 bp, Homo sapiens; identical to SEQ ID NO: 10755
  source 1..722: mol_type = unassigned DNA

SEQ ID NO: 12189 - DNA, 858 bp, Homo sapiens; identical to SEQ ID NO: 10756
  source 1..858: mol_type = unassigned DNA

SEQ ID NO: 12190 - DNA, 598 bp, Homo sapiens; identical to SEQ ID NO: 10757
  source 1..598: mol_type = unassigned DNA

SEQ ID NO: 12191 - DNA, 1281 bp, Homo sapiens; identical to SEQ ID NO: 10758
  source 1..1281: mol_type = unassigned DNA

SEQ ID NO: 12192 - DNA, 1788 bp, Homo sapiens; identical to SEQ ID NO: 10759
  source 1..1788: mol_type = unassigned DNA

SEQ ID NO: 12193 - DNA, 626 bp, Homo sapiens; identical to SEQ ID NO: 10760
  source 1..626: mol_type = unassigned DNA

SEQ ID NO: 12194 - DNA, 1037 bp, Homo sapiens; identical to SEQ ID NO: 10761
  source 1..1037: mol_type = unassigned DNA

SEQ ID NO: 12195 - DNA, 977 bp, Homo sapiens; identical to SEQ ID NO: 10762
  source 1..977: mol_type = unassigned DNA

SEQ ID NO: 12196 - DNA, 6206 bp, Homo sapiens; identical to SEQ ID NO: 10763
  source 1..6206: mol_type = unassigned DNA

SEQ ID NO: 12197 - DNA, 574 bp, Homo sapiens; identical to SEQ ID NO: 10764
  source 1..574: mol_type = unassigned DNA

SEQ ID NO: 12198 - DNA, 3438 bp, Homo sapiens; identical to SEQ ID NO: 10765
  source 1..3438: mol_type = unassigned DNA

SEQ ID NO: 12199 - DNA, 4088 bp, Homo sapiens; identical to SEQ ID NO: 10766
  source 1..4088: mol_type = unassigned DNA

SEQ ID NO: 12200 - DNA, 522 bp, Homo sapiens; identical to SEQ ID NO: 10767
  source 1..522: mol_type = unassigned DNA

SEQ ID NO: 12201 - DNA, 2260 bp, Homo sapiens; identical to SEQ ID NO: 10768
  source 1..2260: mol_type = unassigned DNA

SEQ ID NO: 12202 - DNA, 1502 bp, Homo sapiens; identical to SEQ ID NO: 10769
  source 1..1502: mol_type = unassigned DNA

SEQ ID NO: 12203 - DNA, 510 bp, Homo sapiens; identical to SEQ ID NO: 10770
  source 1..510: mol_type = unassigned DNA

SEQ ID NO: 12204 - DNA, 940 bp, Homo sapiens; identical to SEQ ID NO: 10771
  source 1..940: mol_type = unassigned DNA

SEQ ID NO: 12205 - DNA, 2718 bp, Homo sapiens; identical to SEQ ID NO: 10772
  source 1..2718: mol_type = unassigned DNA

SEQ ID NO: 12206 - DNA, 2661 bp, Homo sapiens; identical to SEQ ID NO: 10773
  source 1..2661: mol_type = unassigned DNA

SEQ ID NO: 12207 - DNA, 801 bp, Homo sapiens; identical to SEQ ID NO: 10774
  source 1..801: mol_type = unassigned DNA

SEQ ID NO: 12208 - DNA, 311 bp, Homo sapiens; identical to SEQ ID NO: 10775
  source 1..311: mol_type = unassigned DNA

SEQ ID NO: 12209 - DNA, 1048 bp, Homo sapiens; identical to SEQ ID NO: 10776
  source 1..1048: mol_type = unassigned DNA

SEQ ID NO: 12210 - DNA, 301 bp, Homo sapiens; identical to SEQ ID NO: 10777
  source 1..301: mol_type = unassigned DNA

SEQ ID NO: 12211 - DNA, 1395 bp, Homo sapiens; identical to SEQ ID NO: 10778
  source 1..1395: mol_type = unassigned DNA

SEQ ID NO: 12212 - DNA, 766 bp, Homo sapiens; identical to SEQ ID NO: 10779
  source 1..766: mol_type = unassigned DNA

SEQ ID NO: 12213 - DNA, 691 bp, Homo sapiens; identical to SEQ ID NO: 10780
  source 1..691: mol_type = unassigned DNA

SEQ ID NO: 12214 - DNA, 1024 bp, Homo sapiens; identical to SEQ ID NO: 10781
  source 1..1024: mol_type = unassigned DNA

SEQ ID NO: 12215 - DNA, 1339 bp, Homo sapiens; identical to SEQ ID NO: 10782
  source 1..1339: mol_type = unassigned DNA

SEQ ID NO: 12216 - DNA, 1376 bp, Homo sapiens; identical to SEQ ID NO: 10791
  source 1..1376: mol_type = unassigned DNA

SEQ ID NO: 12217 - DNA, 3843 bp, Homo sapiens; identical to SEQ ID NO: 10798
  source 1..3843: mol_type = unassigned DNA

SEQ ID NO: 12218 - DNA, 1622 bp, Homo sapiens; identical to SEQ ID NO: 10806
  source 1..1622: mol_type = unassigned DNA

SEQ ID NO: 12219 - DNA, 1441 bp, Homo sapiens; identical to SEQ ID NO: 10817
  source 1..1441: mol_type = unassigned DNA

SEQ ID NO: 12220 - DNA, 848 bp, Homo sapiens; identical to SEQ ID NO: 10826
  source 1..848: mol_type = unassigned DNA

SEQ ID NO: 12221 - DNA, 1230 bp, Homo sapiens; identical to SEQ ID NO: 10827
  source 1..1230: mol_type = unassigned DNA

SEQ ID NO: 12222 - DNA, 2172 bp, Homo sapiens; identical to SEQ ID NO: 10842
  source 1..2172: mol_type = unassigned DNA

SEQ ID NO: 12223 - DNA, 338 bp, Homo sapiens; identical to SEQ ID NO: 10850
  source 1..338: mol_type = unassigned DNA

SEQ ID NO: 12224 - DNA, 5715 bp, Homo sapiens; identical to SEQ ID NO: 10858
  source 1..5715: mol_type = unassigned DNA

SEQ ID NO: 12225 - DNA, 1059 bp, Homo sapiens; identical to SEQ ID NO: 10864
  source 1..1059: mol_type = unassigned DNA

SEQ ID NO: 12226 - DNA, 1503 bp, Homo sapiens; identical to SEQ ID NO: 10872
  source 1..1503: mol_type = unassigned DNA

SEQ ID NO: 12227 - DNA, 1437 bp, Homo sapiens; identical to SEQ ID NO: 10881
  source 1..1437: mol_type = unassigned DNA

SEQ ID NO: 12228 - DNA, 1203 bp, Homo sapiens; identical to SEQ ID NO: 10890
  source 1..1203: mol_type = unassigned DNA

SEQ ID NO: 12229 - DNA, 206 bp, Homo sapiens; identical to SEQ ID NO: 10896
  source 1..206: mol_type = unassigned DNA

SEQ ID NO: 12230 - DNA, 1141 bp, Homo sapiens; identical to SEQ ID NO: 10897
  source 1..1141: mol_type = unassigned DNA

SEQ ID NO: 12231 - DNA, 1819 bp, Homo sapiens; identical to SEQ ID NO: 10898
  source 1..1819: mol_type = unassigned DNA

SEQ ID NO: 12232 - DNA, 1813 bp, Homo sapiens; identical to SEQ ID NO: 10899
  source 1..1813: mol_type = unassigned DNA

SEQ ID NO: 12233 - DNA, 1872 bp, Homo sapiens; identical to SEQ ID NO: 10900
  source 1..1872: mol_type = unassigned DNA

SEQ ID NO: 12234 - DNA, 652 bp, Homo sapiens; identical to SEQ ID NO: 10901
  source 1..652: mol_type = unassigned DNA

SEQ ID NO: 12235 - DNA, 722 bp, Homo sapiens; identical to SEQ ID NO: 10902
  source 1..722: mol_type = unassigned DNA

SEQ ID NO: 12236 - DNA, 858 bp, Homo sapiens; identical to SEQ ID NO: 10903
  source 1..858: mol_type = unassigned DNA

SEQ ID NO: 12237 - DNA, 598 bp, Homo sapiens; identical to SEQ ID NO: 10904
  source 1..598: mol_type = unassigned DNA

SEQ ID NO: 12238 - DNA, 1281 bp, Homo sapiens; identical to SEQ ID NO: 10905
  source 1..1281: mol_type = unassigned DNA

SEQ ID NO: 12239 - DNA, 1788 bp, Homo sapiens; identical to SEQ ID NO: 10906
  source 1..1788: mol_type = unassigned DNA

SEQ ID NO: 12240 - DNA, 626 bp, Homo sapiens; identical to SEQ ID NO: 10907
  source 1..626: mol_type = unassigned DNA

SEQ ID NO: 12241 - DNA, 1037 bp, Homo sapiens; identical to SEQ ID NO: 10908
  source 1..1037: mol_type = unassigned DNA

SEQ ID NO: 12242 - DNA, 977 bp, Homo sapiens; identical to SEQ ID NO: 10909
  source 1..977: mol_type = unassigned DNA

SEQ ID NO: 12243 - DNA, 6206 bp, Homo sapiens; identical to SEQ ID NO: 10910
  source 1..6206: mol_type = unassigned DNA

SEQ ID NO: 12244 - DNA, 574 bp, Homo sapiens; identical to SEQ ID NO: 10911
  source 1..574: mol_type = unassigned DNA

SEQ ID NO: 12245 - DNA, 3438 bp, Homo sapiens; identical to SEQ ID NO: 10912
  source 1..3438: mol_type = unassigned DNA

SEQ ID NO: 12246 - DNA, 4088 bp, Homo sapiens; identical to SEQ ID NO: 10913
  source 1..4088: mol_type = unassigned DNA

SEQ ID NO: 12247 - DNA, 522 bp, Homo sapiens; identical to SEQ ID NO: 10914
  source 1..522: mol_type = unassigned DNA

SEQ ID NO: 12248 - DNA, 2260 bp, Homo sapiens; identical to SEQ ID NO: 10915
  source 1..2260: mol_type = unassigned DNA

SEQ ID NO: 12249 - DNA, 1502 bp, Homo sapiens; identical to SEQ ID NO: 10916
  source 1..1502: mol_type = unassigned DNA

SEQ ID NO: 12250 - DNA, 510 bp, Homo sapiens; identical to SEQ ID NO: 10917
  source 1..510: mol_type = unassigned DNA

SEQ ID NO: 12251 - DNA, 940 bp, Homo sapiens; identical to SEQ ID NO: 10918
  source 1..940: mol_type = unassigned DNA

SEQ ID NO: 12252 - DNA, 2718 bp, Homo sapiens; identical to SEQ ID NO: 10919
  source 1..2718: mol_type = unassigned DNA

SEQ ID NO: 12253 - DNA, 2661 bp, Homo sapiens; identical to SEQ ID NO: 10920
  source 1..2661: mol_type = unassigned DNA

SEQ ID NO: 12254 - DNA, 801 bp, Homo sapiens; identical to SEQ ID NO: 10921
  source 1..801: mol_type = unassigned DNA

SEQ ID NO: 12255 - DNA, 311 bp, Homo sapiens; identical to SEQ ID NO: 10922
  source 1..311: mol_type = unassigned DNA

SEQ ID NO: 12256 - DNA, 1048 bp, Homo sapiens; identical to SEQ ID NO: 10923
  source 1..1048: mol_type = unassigned DNA

SEQ ID NO: 12257 - DNA, 301 bp, Homo sapiens; identical to SEQ ID NO: 10924
  source 1..301: mol_type = unassigned DNA

SEQ ID NO: 12258 - DNA, 1395 bp, Homo sapiens; identical to SEQ ID NO: 10925
  source 1..1395: mol_type = unassigned DNA

SEQ ID NO: 12259 - DNA, 766 bp, Homo sapiens; identical to SEQ ID NO: 10926
  source 1..766: mol_type = unassigned DNA

SEQ ID NO: 12260 - DNA, 691 bp, Homo sapiens; identical to SEQ ID NO: 10927
  source 1..691: mol_type = unassigned DNA

SEQ ID NO: 12261 - DNA, 1024 bp, Homo sapiens; identical to SEQ ID NO: 10928
  source 1..1024: mol_type = unassigned DNA

SEQ ID NO: 12262 - DNA, 1339 bp, Homo sapiens; identical to SEQ ID NO: 10929
  source 1..1339: mol_type = unassigned DNA

SEQ ID NO: 12263 - DNA, 1376 bp, Homo sapiens; identical to SEQ ID NO: 10938
  source 1..1376: mol_type = unassigned DNA

SEQ ID NO: 12264 - DNA, 3843 bp, Homo sapiens; identical to SEQ ID NO: 10945
  source 1..3843: mol_type = unassigned DNA

SEQ ID NO: 12265 - DNA, 1622 bp, Homo sapiens; identical to SEQ ID NO: 10953
  source 1..1622: mol_type = unassigned DNA

SEQ ID NO: 12266 - DNA, 1441 bp, Homo sapiens; identical to SEQ ID NO: 10964
  source 1..1441: mol_type = unassigned DNA

SEQ ID NO: 12267 - DNA, 848 bp, synthetic construct; identical to SEQ ID NO: 10973
  misc_feature 1..848: note = Description of Artificial Sequence: Synthetic polynucleotide
  source 1..848: mol_type = other DNA

SEQ ID NO: 12268 - DNA, 1230 bp, synthetic construct; identical to SEQ ID NO: 10974
  misc_feature 1..1230: note = Description of Artificial Sequence: Synthetic polynucleotide
  source 1..1230: mol_type = other DNA

SEQ ID NO: 12269 - DNA, 2172 bp, synthetic construct; identical to SEQ ID NO: 10989
  misc_feature 1..2172: note = Description of Artificial Sequence: Synthetic polynucleotide
  source 1..2172: mol_type = other DNA

SEQ ID NO: 12270 - DNA, 338 bp, synthetic construct; identical to SEQ ID NO: 10997
  misc_feature 1..338: note = Description of Artificial Sequence: Synthetic polynucleotide
  source 1..338: mol_type = other DNA

SEQ ID NO: 12271 - DNA, 5715 bp, synthetic construct; identical to SEQ ID NO: 11005
  misc_feature 1..5715: note = Description of Artificial Sequence: Synthetic polynucleotide
  source 1..5715: mol_type = other DNA

SEQ ID NO: 12272 - DNA, 1059 bp, synthetic construct; identical to SEQ ID NO: 11011
  misc_feature 1..1059: note = Description of Artificial Sequence: Synthetic polynucleotide
  source 1..1059: mol_type = other DNA

SEQ ID NO: 12273 - DNA, 1503 bp, synthetic construct; identical to SEQ ID NO: 11019
  misc_feature 1..1503: note = Description of Artificial Sequence: Synthetic polynucleotide
  source 1..1503: mol_type = other DNA

SEQ ID NO: 12274 - DNA, 1437 bp, synthetic construct; identical to SEQ ID NO: 11028
  misc_feature 1..1437: note = Description of Artificial Sequence: Synthetic polynucleotide
  source 1..1437: mol_type = other DNA

SEQ ID NO: 12275 - DNA, 1203 bp, synthetic construct; identical to SEQ ID NO: 11037
  misc_feature 1..1203: note = Description of Artificial Sequence: Synthetic polynucleotide
  source 1..1203: mol_type = other DNA

SEQ ID NO: 12276 - DNA, 206 bp, synthetic construct; identical to SEQ ID NO: 11043
  misc_feature 1..206: note = Description of Artificial Sequence: Synthetic polynucleotide
  source 1..206: mol_type = other DNA

SEQ ID NO: 12277 - DNA, 1141 bp, synthetic construct; identical to SEQ ID NO: 11044
  misc_feature 1..1141: note = Description of Artificial Sequence: Synthetic polynucleotide
  source 1..1141: mol_type = other DNA

SEQ ID NO: 12278 - DNA, 1819 bp, synthetic construct; identical to SEQ ID NO: 11045
  misc_feature 1..1819: note = Description of Artificial Sequence: Synthetic polynucleotide
  source 1..1819: mol_type = other DNA

SEQ ID NO: 12279 - DNA, 1813 bp, synthetic construct; identical to SEQ ID NO: 11046
  misc_feature 1..1813: note = Description of Artificial Sequence: Synthetic polynucleotide
  source 1..1813: mol_type = other DNA

SEQ ID NO: 12280 - DNA, 1872 bp, synthetic construct; identical to SEQ ID NO: 11047
  misc_feature 1..1872: note = Description of Artificial Sequence: Synthetic polynucleotide
  source 1..1872: mol_type = other DNA

SEQ ID NO: 12281 - DNA, 652 bp, synthetic construct; identical to SEQ ID NO: 11048
  misc_feature 1..652: note = Description of Artificial Sequence: Synthetic polynucleotide
  source 1..652: mol_type = other DNA

SEQ ID NO: 12282 - DNA, 722 bp, synthetic construct; identical to SEQ ID NO: 11049
  misc_feature 1..722: note = Description of Artificial Sequence: Synthetic polynucleotide
  source 1..722: mol_type = other DNA

SEQ ID NO: 12283 - DNA, 858 bp, synthetic construct; identical to SEQ ID NO: 11050
  misc_feature 1..858: note = Description of Artificial Sequence: Synthetic polynucleotide
  source 1..858: mol_type = other DNA

SEQ ID NO: 12284 - DNA, 598 bp, synthetic construct; identical to SEQ ID NO: 11051
  misc_feature 1..598: note = Description of Artificial Sequence: Synthetic polynucleotide
  source 1..598: mol_type = other DNA

SEQ ID NO: 12285 - DNA, 1281 bp, synthetic construct; identical to SEQ ID NO: 11052
  misc_feature 1..1281: note = Description of Artificial Sequence: Synthetic polynucleotide
  source 1..1281: mol_type = other DNA

SEQ ID NO: 12286 - DNA, 1788 bp, synthetic construct; identical to SEQ ID NO: 11053
  misc_feature 1..1788: note = Description of Artificial Sequence: Synthetic polynucleotide
  source 1..1788: mol_type = other DNA

SEQ ID NO: 12287 - DNA, 626 bp, synthetic construct; identical to SEQ ID NO: 11054
  misc_feature 1..626: note = Description of Artificial Sequence: Synthetic polynucleotide
  source 1..626: mol_type = other DNA

SEQ ID NO: 12288 - DNA, 1037 bp, synthetic construct; identical to SEQ ID NO: 11055
  misc_feature 1..1037: note = Description of Artificial Sequence: Synthetic polynucleotide
  source 1..1037: mol_type = other DNA

SEQ ID NO: 12289 - DNA, 977 bp, synthetic construct; identical to SEQ ID NO: 11056
  misc_feature 1..977: note = Description of Artificial Sequence: Synthetic polynucleotide
  source 1..977: mol_type = other DNA

SEQ ID NO: 12290 - DNA, 6206 bp, synthetic construct; identical to SEQ ID NO: 11057
  misc_feature 1..6206: note = Description of Artificial Sequence: Synthetic polynucleotide
  source 1..6206: mol_type = other DNA

SEQ ID NO: 12291 - DNA, 574 bp, synthetic construct; identical to SEQ ID NO: 11058
  misc_feature 1..574: note = Description of Artificial Sequence: Synthetic polynucleotide
  source 1..574: mol_type = other DNA

SEQ ID NO: 12292 - DNA, 3438 bp, synthetic construct; identical to SEQ ID NO: 11059
  misc_feature 1..3438: note = Description of Artificial Sequence: Synthetic polynucleotide
  source 1..3438: mol_type = other DNA

SEQ ID NO: 12293 - DNA, 4088 bp, synthetic construct; identical to SEQ ID NO: 11060
  misc_feature 1..4088: note = Description of Artificial Sequence: Synthetic polynucleotide
  source 1..4088: mol_type = other DNA

SEQ ID NO: 12294 - DNA, 522 bp, synthetic construct; identical to SEQ ID NO: 11061
  misc_feature 1..522: note = Description of Artificial Sequence: Synthetic polynucleotide
  source 1..522: mol_type = other DNA

SEQ ID NO: 12295 - DNA, 2260 bp, synthetic construct; identical to SEQ ID NO: 11062
  misc_feature 1..2260: note = Description of Artificial Sequence: Synthetic polynucleotide
  source 1..2260: mol_type = other DNA

SEQ ID NO: 12296 - DNA, 1502 bp, synthetic construct; identical to SEQ ID NO: 11063
  misc_feature 1..1502: note = Description of Artificial Sequence: Synthetic polynucleotide
  source 1..1502: mol_type = other DNA

SEQ ID NO: 12297 - DNA, 510 bp, synthetic construct; identical to SEQ ID NO: 11064
  misc_feature 1..510: note = Description of Artificial Sequence: Synthetic polynucleotide
  source 1..510: mol_type = other DNA

SEQ ID NO: 12298 - DNA, 940 bp, synthetic construct; identical to SEQ ID NO: 11065
  misc_feature 1..940: note = Description of Artificial Sequence: Synthetic polynucleotide
  source 1..940: mol_type = other DNA

SEQ ID NO: 12299 - DNA, 2718 bp, synthetic construct; identical to SEQ ID NO: 11066
  misc_feature 1..2718: note = Description of Artificial Sequence: Synthetic polynucleotide
  source 1..2718: mol_type = other DNA

SEQ ID NO: 12300 - DNA, 2661 bp, synthetic construct; identical to SEQ ID NO: 11067
  misc_feature 1..2661: note = Description of Artificial Sequence: Synthetic polynucleotide
  source 1..2661: mol_type = other DNA

SEQ ID NO: 12301 - DNA, 801 bp, synthetic construct; identical to SEQ ID NO: 11068
  misc_feature 1..801: note = Description of Artificial Sequence: Synthetic polynucleotide
  source 1..801: mol_type = other DNA

SEQ ID NO: 12302 - DNA, 311 bp, synthetic construct; identical to SEQ ID NO: 11069
  misc_feature 1..311: note = Description of Artificial Sequence: Synthetic polynucleotide
  source 1..311: mol_type = other DNA

SEQ ID NO: 12303 - DNA, 1048 bp, synthetic construct; identical to SEQ ID NO: 11070
  misc_feature 1..1048: note = Description of Artificial Sequence: Synthetic polynucleotide
  source 1..1048: mol_type = other DNA

SEQ ID NO: 12304 - DNA, 301 bp, synthetic construct; identical to SEQ ID NO: 11071
  misc_feature 1..301: note = Description of Artificial Sequence: Synthetic polynucleotide
  source 1..301: mol_type = other DNA

SEQ ID NO: 12305 - DNA, 1395 bp, synthetic construct; identical to SEQ ID NO: 11072
  misc_feature 1..1395: note = Description of Artificial Sequence: Synthetic polynucleotide
  source 1..1395: mol_type = other DNA

SEQ ID NO: 12306 - DNA, 766 bp, synthetic construct; identical to SEQ ID NO: 11073
  misc_feature 1..766: note = Description of Artificial Sequence: Synthetic polynucleotide
  source 1..766: mol_type = other DNA

SEQ ID NO: 12307 - DNA, 691 bp, synthetic construct; identical to SEQ ID NO: 11074
  misc_feature 1..691: note = Description of Artificial Sequence: Synthetic polynucleotide
  source 1..691: mol_type = other DNA

SEQ ID NO: 12308 - DNA, 1024 bp, synthetic construct; identical to SEQ ID NO: 11075
  misc_feature 1..1024: note = Description of Artificial Sequence: Synthetic polynucleotide
  source 1..1024: mol_type = other DNA

SEQ ID NO: 12309 - DNA, 1339 bp, synthetic construct; identical to SEQ ID NO: 11076
  misc_feature 1..1339: note = Description of Artificial Sequence: Synthetic polynucleotide
  source 1..1339: mol_type = other DNA

SEQ ID NO: 12310 - DNA, 1376 bp, synthetic construct; identical to SEQ ID NO: 11085
  misc_feature 1..1376: note = Description of Artificial Sequence: Synthetic polynucleotide
  source 1..1376: mol_type = other DNA

SEQ ID NO: 12311 - DNA, 3843 bp, synthetic construct; identical to SEQ ID NO: 11092
  misc_feature 1..3843: note = Description of Artificial Sequence: Synthetic polynucleotide
  source 1..3843: mol_type = other DNA

SEQ ID NO: 12312 - DNA, 1622 bp, synthetic construct; identical to SEQ ID NO: 11100
  misc_feature 1..1622: note = Description of Artificial Sequence: Synthetic polynucleotide
  source 1..1622: mol_type = other DNA

SEQ ID NO: 12313 - DNA, 1441 bp, synthetic construct; identical to SEQ ID NO: 11111
  misc_feature 1..1441: note = Description of Artificial Sequence: Synthetic polynucleotide
  source 1..1441: mol_type = other DNA

SEQ ID NO: 12314 - DNA, 848 bp, synthetic construct; identical to SEQ ID NO: 11120
  misc_feature 1..848: note = Description of Artificial Sequence: Synthetic polynucleotide
  source 1..848: mol_type = other DNA

SEQ ID NO: 12315 - DNA, 1230 bp, synthetic construct; identical to SEQ ID NO: 11121
  misc_feature 1..1230: note = Description of Artificial Sequence: Synthetic polynucleotide
  source 1..1230: mol_type = other DNA

SEQ ID NO: 12316 - DNA, 2172 bp, synthetic construct; identical to SEQ ID NO: 11136
  misc_feature 1..2172: note = Description of Artificial Sequence: Synthetic polynucleotide
  source 1..2172: mol_type = other DNA

SEQ ID NO: 12317 - DNA, 338 bp, synthetic construct; identical to SEQ ID NO: 11144
  misc_feature 1..338: note = Description of Artificial Sequence: Synthetic polynucleotide
  source 1..338: mol_type = other DNA

SEQ ID NO: 12318 - DNA, 5715 bp, synthetic construct; identical to SEQ ID NO: 11152
  misc_feature 1..5715: note = Description of Artificial Sequence: Synthetic polynucleotide
  source 1..5715: mol_type = other DNA

SEQ ID NO: 12319 - DNA, 1059 bp, synthetic construct; identical to SEQ ID NO: 11158
  misc_feature 1..1059: note = Description of Artificial Sequence: Synthetic polynucleotide
  source 1..1059: mol_type = other DNA

SEQ ID NO: 12320 - DNA, 1503 bp, synthetic construct; identical to SEQ ID NO: 11166
  misc_feature 1..1503: note = Description of Artificial Sequence: Synthetic polynucleotide
  source 1..1503: mol_type = other DNA

SEQ ID NO: 12321 - DNA, 1437 bp, synthetic construct; identical to SEQ ID NO: 11175
  misc_feature 1..1437: note = Description of Artificial Sequence: Synthetic polynucleotide
  source 1..1437: mol_type = other DNA

SEQ ID NO: 12322 - DNA, 1203 bp, synthetic construct; identical to SEQ ID NO: 11184
  misc_feature 1..1203: note = Description of Artificial Sequence: Synthetic polynucleotide
  source 1..1203: mol_type = other DNA

SEQ ID NO: 12323 - DNA, 206 bp, synthetic construct; identical to SEQ ID NO: 11190
  misc_feature 1..206: note = Description of Artificial Sequence: Synthetic polynucleotide
  source 1..206: mol_type = other DNA

SEQ ID NO: 12324 - DNA, 1141 bp, synthetic construct; identical to SEQ ID NO: 11191
  misc_feature 1..1141: note = Description of Artificial Sequence: Synthetic polynucleotide
  source 1..1141: mol_type = other DNA

SEQ ID NO: 12325 - DNA, 1819 bp, synthetic construct; identical to SEQ ID NO: 11192
  misc_feature 1..1819: note = Description of Artificial Sequence: Synthetic polynucleotide
  source 1..1819: mol_type = other DNA

SEQ ID NO: 12326 - DNA, 1813 bp, synthetic construct; identical to SEQ ID NO: 11193
  misc_feature 1..1813: note = Description of Artificial Sequence: Synthetic polynucleotide
  source 1..1813: mol_type = other DNA

SEQ ID NO: 12327 - DNA, 1872 bp, synthetic construct; identical to SEQ ID NO: 11194
  misc_feature 1..1872: note = Description of Artificial Sequence: Synthetic polynucleotide
  source 1..1872: mol_type = other DNA

SEQ ID NO: 12328 - DNA, 652 bp, synthetic construct; identical to SEQ ID NO: 11195
  misc_feature 1..652: note = Description of Artificial Sequence: Synthetic polynucleotide
  source 1..652: mol_type = other DNA

SEQ ID NO: 12329 - DNA, 722 bp, synthetic construct; identical to SEQ ID NO: 11196
  misc_feature 1..722: note = Description of Artificial Sequence: Synthetic polynucleotide
  source 1..722: mol_type = other DNA

SEQ ID NO: 12330 - DNA, 858 bp, synthetic construct; identical to SEQ ID NO: 11197
  misc_feature 1..858: note = Description of Artificial Sequence: Synthetic polynucleotide
  source 1..858: mol_type = other DNA

SEQ ID NO: 12331 - DNA, 598 bp, synthetic construct; identical to SEQ ID NO: 11198
  misc_feature 1..598: note = Description of Artificial Sequence: Synthetic polynucleotide
  source 1..598: mol_type = other DNA

SEQ ID NO: 12332 - DNA, 1281 bp, synthetic construct; identical to SEQ ID NO: 11199
  misc_feature 1..1281: note = Description of Artificial Sequence: Synthetic polynucleotide
  source 1..1281: mol_type = other DNA

SEQ ID NO: 12333 - DNA, 1788 bp, synthetic construct; identical to SEQ ID NO: 11200
  misc_feature 1..1788: note = Description of Artificial Sequence: Synthetic polynucleotide
  source 1..1788: mol_type = other DNA

SEQ ID NO: 12334 - DNA, 626 bp, synthetic construct; identical to SEQ ID NO: 11201
  misc_feature 1..626: note = Description of Artificial Sequence: Synthetic polynucleotide
  source 1..626: mol_type = other DNA

SEQ ID NO: 12335 - DNA, 1037 bp, synthetic construct; identical to SEQ ID NO: 11202
  misc_feature 1..1037: note = Description of Artificial Sequence: Synthetic polynucleotide
  source 1..1037: mol_type = other DNA

SEQ ID NO: 12336 - DNA, 977 bp, synthetic construct; identical to SEQ ID NO: 11203
  misc_feature 1..977: note = Description of Artificial Sequence: Synthetic polynucleotide
  source 1..977: mol_type = other DNA

SEQ ID NO: 12337 - DNA, 6206 bp, synthetic construct; identical to SEQ ID NO: 11204
  misc_feature 1..6206: note = Description of Artificial Sequence: Synthetic polynucleotide
  source 1..6206: mol_type = other DNA

SEQ ID NO: 12338 - DNA, 574 bp, synthetic construct; identical to SEQ ID NO: 11205
  misc_feature 1..574: note = Description of Artificial Sequence: Synthetic polynucleotide
  source 1..574: mol_type = other DNA

SEQ ID NO: 12339 - DNA, 3438 bp, synthetic construct; identical to SEQ ID NO: 11206
  misc_feature 1..3438: note = Description of Artificial Sequence: Synthetic polynucleotide
  source 1..3438: mol_type = other DNA

SEQ ID NO: 12340 - DNA, 4088 bp, synthetic construct; identical to SEQ ID NO: 11207
  misc_feature 1..4088: note = Description of Artificial Sequence: Synthetic polynucleotide
  source 1..4088: mol_type = other DNA

SEQ ID NO: 12341 - DNA, 522 bp, synthetic construct; identical to SEQ ID NO: 11208
  misc_feature 1..522: note = Description of Artificial Sequence: Synthetic polynucleotide
  source 1..522: mol_type = other DNA

SEQ ID NO: 12342 - DNA, 2260 bp, synthetic construct; identical to SEQ ID NO: 11209
  misc_feature 1..2260: note = Description of Artificial Sequence: Synthetic polynucleotide
  source 1..2260: mol_type = other DNA

SEQ ID NO: 12343 - DNA, 1502 bp, synthetic construct; identical to SEQ ID NO: 11210
  misc_feature 1..1502: note = Description of Artificial Sequence: Synthetic polynucleotide
  source 1..1502: mol_type = other DNA

SEQ ID NO: 12344 - DNA, 510 bp, synthetic construct; identical to SEQ ID NO: 11211
  misc_feature 1..510: note = Description of Artificial Sequence: Synthetic polynucleotide
  source 1..510: mol_type = other DNA

SEQ ID NO: 12345 - DNA, 940 bp, synthetic construct; identical to SEQ ID NO: 11212
  misc_feature 1..940: note = Description of Artificial Sequence: Synthetic polynucleotide
  source 1..940: mol_type = other DNA

SEQ ID NO: 12346 - DNA, 2718 bp, synthetic construct; identical to SEQ ID NO: 11213
  misc_feature 1..2718: note = Description of Artificial Sequence: Synthetic polynucleotide
  source 1..2718: mol_type = other DNA

SEQ ID NO: 12347 - DNA, 2661 bp, synthetic construct; identical to SEQ ID NO: 11214
  misc_feature 1..2661: note = Description of Artificial Sequence: Synthetic polynucleotide
  source 1..2661: mol_type = other DNA

SEQ ID NO: 12348 - DNA, 801 bp, synthetic construct; identical to SEQ ID NO: 11215
  misc_feature 1..801: note = Description of Artificial Sequence: Synthetic polynucleotide
  source 1..801: mol_type = other DNA

SEQ ID NO: 12349 - DNA, 311 bp, synthetic construct; identical to SEQ ID NO: 11216
  misc_feature 1..311: note = Description of Artificial Sequence: Synthetic polynucleotide
  source 1..311: mol_type = other DNA

SEQ ID NO: 12350 - DNA, 1048 bp, synthetic construct; identical to SEQ ID NO: 11217
  misc_feature 1..1048: note = Description of Artificial Sequence: Synthetic polynucleotide
  source 1..1048: mol_type = other DNA

SEQ ID NO: 12351 - DNA, 301 bp, synthetic construct; identical to SEQ ID NO: 11218
  misc_feature 1..301: note = Description of Artificial Sequence: Synthetic polynucleotide
  source 1..301: mol_type = other DNA

SEQ ID NO: 12352 - DNA, 1395 bp, synthetic construct; identical to SEQ ID NO: 11219
  misc_feature 1..1395: note = Description of Artificial Sequence: Synthetic polynucleotide
  source 1..1395: mol_type = other DNA

SEQ ID NO: 12353 - DNA, 766 bp, synthetic construct; identical to SEQ ID NO: 11220
  misc_feature 1..766: note = Description of Artificial Sequence: Synthetic polynucleotide
  source 1..766: mol_type = other DNA

SEQ ID NO: 12354 - DNA, 691 bp, synthetic construct; identical to SEQ ID NO: 11221
  misc_feature 1..691: note = Description of Artificial Sequence: Synthetic polynucleotide
  source 1..691: mol_type = other DNA

SEQ ID NO: 12355 - DNA, 1024 bp, synthetic construct; identical to SEQ ID NO: 11222
  misc_feature 1..1024: note = Description of Artificial Sequence: Synthetic polynucleotide
  source 1..1024: mol_type = other DNA

SEQ ID NO: 12356 - DNA, 1339 bp, synthetic construct; identical to SEQ ID NO: 11223
  misc_feature 1..1339: note = Description of Artificial Sequence: Synthetic polynucleotide
  source 1..1339: mol_type = other DNA

SEQ ID NO: 12357 - DNA, 1376 bp, synthetic construct; identical to SEQ ID NO: 11232
  misc_feature 1..1376: note = Description of Artificial Sequence: Synthetic polynucleotide
  source 1..1376: mol_type = other DNA

SEQ ID NO: 12358 - DNA, 3843 bp, synthetic construct; identical to SEQ ID NO: 11239
  misc_feature 1..3843: note = Description of Artificial Sequence: Synthetic polynucleotide
  source 1..3843: mol_type = other DNA

SEQ ID NO: 12359 - DNA, 1622 bp, synthetic construct; identical to SEQ ID NO: 11247
  misc_feature 1..1622: note = Description of Artificial Sequence: Synthetic polynucleotide
  source 1..1622: mol_type = other DNA

SEQ ID NO: 12360 - DNA, 1441 bp, synthetic construct; identical to SEQ ID NO: 11258
  misc_feature 1..1441: note = Description of Artificial Sequence: Synthetic polynucleotide
  source 1..1441: mol_type = other DNA

SEQ ID NO: 12361 - DNA, 848 bp, synthetic construct; identical to SEQ ID NO: 11267
  misc_feature 1..848: note = Description of Artificial Sequence: Synthetic polynucleotide
  source 1..848: mol_type = other DNA

SEQ ID NO: 12362 - DNA, 1230 bp, synthetic construct; identical to SEQ ID NO: 11268
  misc_feature 1..1230: note = Description of Artificial Sequence: Synthetic polynucleotide
  source 1..1230: mol_type = other DNA

SEQ ID NO: 12363 - DNA, 2172 bp, synthetic construct; identical to SEQ ID NO: 11283
  misc_feature 1..2172: note = Description of Artificial Sequence: Synthetic polynucleotide
  source 1..2172: mol_type = other DNA

SEQ ID NO: 12364 - DNA, 338 bp, synthetic construct; identical to SEQ ID NO: 11291
  misc_feature 1..338: note = Description of Artificial Sequence: Synthetic polynucleotide
  source 1..338: mol_type = other DNA

SEQ ID NO: 12365 - DNA, 5715 bp, synthetic construct; identical to SEQ ID NO: 11299
  misc_feature 1..5715: note = Description of Artificial Sequence: Synthetic polynucleotide
  source 1..5715: mol_type = other DNA

SEQ ID NO: 12366 - DNA, 1059 bp, synthetic construct; identical to SEQ ID NO: 11305
  misc_feature 1..1059: note = Description of Artificial Sequence: Synthetic polynucleotide
  source 1..1059: mol_type = other DNA

SEQ ID NO: 12367 - DNA, 1503 bp, synthetic construct; identical to SEQ ID NO: 11313
  misc_feature 1..1503: note = Description of Artificial Sequence: Synthetic polynucleotide
  source 1..1503: mol_type = other DNA

SEQ ID NO: 12368 - DNA, 1437 bp, synthetic construct; identical to SEQ ID NO: 11322
  misc_feature 1..1437: note = Description of Artificial Sequence: Synthetic polynucleotide
  source 1..1437: mol_type = other DNA

SEQ ID NO: 12369 - DNA, 1203 bp, synthetic construct; identical to SEQ ID NO: 11331
  misc_feature 1..1203: note = Description of Artificial Sequence: Synthetic polynucleotide
  source 1..1203: mol_type = other DNA

SEQ ID NO: 12370 - DNA, 206 bp, synthetic construct; identical to SEQ ID NO: 11337
  misc_feature 1..206: note = Description of Artificial Sequence: Synthetic polynucleotide
  source 1..206: mol_type = other DNA

SEQ ID NO: 12371 - DNA, 1141 bp, synthetic construct; identical to SEQ ID NO: 11338
  misc_feature 1..1141: note = Description of Artificial Sequence: Synthetic polynucleotide
  source 1..1141: mol_type = other DNA

SEQ ID NO: 12372 - DNA, 1819 bp, synthetic construct; identical to SEQ ID NO: 11339
  misc_feature 1..1819: note = Description of Artificial Sequence: Synthetic polynucleotide
  source 1..1819: mol_type = other DNA

SEQ ID NO: 12373 - DNA, 1813 bp, synthetic construct; identical to SEQ ID NO: 11340
  misc_feature 1..1813: note = Description of Artificial Sequence: Synthetic polynucleotide
  source 1..1813: mol_type = other DNA

SEQ ID NO: 12374 - DNA, 1872 bp, synthetic construct; identical to SEQ ID NO: 11341
  misc_feature 1..1872: note = Description of Artificial Sequence: Synthetic polynucleotide
  source 1..1872: mol_type = other DNA

SEQ ID NO: 12375 - DNA, 652 bp, synthetic construct; identical to SEQ ID NO: 11342
  misc_feature 1..652: note = Description of Artificial Sequence: Synthetic polynucleotide
  source 1..652: mol_type = other DNA

SEQ ID NO: 12376 - DNA, 722 bp, synthetic construct; identical to SEQ ID NO: 11343
  misc_feature 1..722: note = Description of Artificial Sequence: Synthetic polynucleotide
  source 1..722: mol_type = other DNA

SEQ ID NO: 12377 - DNA, 858 bp, synthetic construct; identical to SEQ ID NO: 11344
  misc_feature 1..858: note = Description of Artificial Sequence: Synthetic polynucleotide
  source 1..858: mol_type = other DNA

SEQ ID NO: 12378 - DNA, 598 bp, synthetic construct; identical to SEQ ID NO: 11345
  misc_feature 1..598: note = Description of Artificial Sequence: Synthetic polynucleotide
  source 1..598: mol_type = other DNA

SEQ ID NO: 12379 - DNA, 1281 bp, synthetic construct; identical to SEQ ID NO: 11346
  misc_feature 1..1281: note = Description of Artificial Sequence: Synthetic polynucleotide
  source 1..1281: mol_type = other DNA

SEQ ID NO: 12380 - DNA, 1788 bp, synthetic construct; identical to SEQ ID NO: 11347
  misc_feature 1..1788: note = Description of Artificial Sequence: Synthetic polynucleotide
  source 1..1788: mol_type = other DNA

SEQ ID NO: 12381 - DNA, 626 bp, synthetic construct; identical to SEQ ID NO: 11348
  misc_feature 1..626: note = Description of Artificial Sequence: Synthetic polynucleotide
  source 1..626: mol_type = other DNA

SEQ ID NO: 12382 - DNA, 1037 bp, synthetic construct; identical to SEQ ID NO: 11349
  misc_feature 1..1037: note = Description of Artificial Sequence: Synthetic polynucleotide
  source 1..1037: mol_type = other DNA

SEQ ID NO: 12383 - DNA, 977 bp, synthetic construct; identical to SEQ ID NO: 11350
  misc_feature 1..977: note = Description of Artificial Sequence: Synthetic polynucleotide
  source 1..977: mol_type = other DNA

SEQ ID NO: 12384 - DNA, 6206 bp, synthetic construct; identical to SEQ ID NO: 11351
  misc_feature 1..6206: note = Description of Artificial Sequence: Synthetic polynucleotide
  source 1..6206: mol_type = other DNA

SEQ ID NO: 12385 - DNA, 574 bp, synthetic construct; identical to SEQ ID NO: 11352
  misc_feature 1..574: note = Description of Artificial Sequence: Synthetic polynucleotide
  source 1..574: mol_type = other DNA

SEQ ID NO: 12386 - DNA, 3438 bp, synthetic construct; identical to SEQ ID NO: 11353
  misc_feature 1..3438: note = Description of Artificial Sequence: Synthetic polynucleotide
  source 1..3438: mol_type = other DNA

SEQ ID NO: 12387 - DNA, 4088 bp, synthetic construct; identical to SEQ ID NO: 11354
  misc_feature 1..4088: note = Description of Artificial Sequence: Synthetic polynucleotide
  source 1..4088: mol_type = other DNA

SEQ ID NO: 12388 - DNA, 522 bp, synthetic construct; identical to SEQ ID NO: 11355
  misc_feature 1..522: note = Description of Artificial Sequence: Synthetic polynucleotide
  source 1..522: mol_type = other DNA

SEQ ID NO: 12389 - DNA, 2260 bp, synthetic construct; identical to SEQ ID NO: 11356
  misc_feature 1..2260: note = Description of Artificial Sequence: Synthetic polynucleotide
  source 1..2260: mol_type = other DNA

SEQ ID NO: 12390 - DNA, 1502 bp, synthetic construct; identical to SEQ ID NO: 11357
  misc_feature 1..1502: note = Description of Artificial Sequence: Synthetic polynucleotide
  source 1..1502: mol_type = other DNA

SEQ ID NO: 12391 - DNA, 510 bp, synthetic construct; identical to SEQ ID NO: 11358
  misc_feature 1..510: note = Description of Artificial Sequence: Synthetic polynucleotide
  source 1..510: mol_type = other DNA

SEQ ID NO: 12392 - DNA, 940 bp, synthetic construct; identical to SEQ ID NO: 11359
  misc_feature 1..940: note = Description of Artificial Sequence: Synthetic polynucleotide
  source 1..940: mol_type = other DNA

SEQ ID NO: 12393 - DNA, 2718 bp, synthetic construct; identical to SEQ ID NO: 11360
  misc_feature 1..2718: note = Description of Artificial Sequence: Synthetic polynucleotide
  source 1..2718: mol_type = other DNA

SEQ ID NO: 12394 - DNA, 2661 bp, synthetic construct; identical to SEQ ID NO: 11361
  misc_feature 1..2661: note = Description of Artificial Sequence: Synthetic polynucleotide
  source 1..2661: mol_type = other DNA

SEQ ID NO: 12395 - DNA, 801 bp, synthetic construct; identical to SEQ ID NO: 11362
  misc_feature 1..801: note = Description of Artificial Sequence: Synthetic polynucleotide
  source 1..801: mol_type = other DNA

SEQ ID NO: 12396 - DNA, 311 bp, synthetic construct; identical to SEQ ID NO: 11363
  misc_feature 1..311: note = Description of Artificial Sequence: Synthetic polynucleotide
  source 1..311: mol_type = other DNA

SEQ ID NO: 12397 - DNA, 1048 bp, synthetic construct; identical to SEQ ID NO: 11364
  misc_feature 1..1048: note = Description of Artificial Sequence: Synthetic polynucleotide
  source 1..1048: mol_type = other DNA

SEQ ID NO: 12398 - DNA, 301 bp, synthetic construct; identical to SEQ ID NO: 11365
  misc_feature 1..301: note = Description of Artificial Sequence: Synthetic polynucleotide
  source 1..301: mol_type = other DNA

SEQ ID NO: 12399 - DNA, 1395 bp, synthetic construct; identical to SEQ ID NO: 11366
  misc_feature 1..1395: note = Description of Artificial Sequence: Synthetic polynucleotide
  source 1..1395: mol_type = other DNA

SEQ ID NO: 12400 - DNA, 766 bp, synthetic construct; identical to SEQ ID NO: 11367
  misc_feature 1..766: note = Description of Artificial Sequence: Synthetic polynucleotide
  source 1..766: mol_type = other DNA

SEQ ID NO: 12401 - DNA, 691 bp, synthetic construct; identical to SEQ ID NO: 11368
  misc_feature 1..691: note = Description of Artificial Sequence: Synthetic polynucleotide
  source 1..691: mol_type = other DNA

SEQ ID NO: 12402 - DNA, 1024 bp, synthetic construct; identical to SEQ ID NO: 11369
  misc_feature 1..1024: note = Description of Artificial Sequence: Synthetic polynucleotide
  source 1..1024: mol_type = other DNA

SEQ ID NO: 12403 - DNA, 1339 bp, synthetic construct; identical to SEQ ID NO: 11370
  misc_feature 1..1339: note = Description of Artificial Sequence: Synthetic polynucleotide
  source 1..1339: mol_type = other DNA

SEQ ID NO: 12404 - DNA, 1376 bp, synthetic construct; identical to SEQ ID NO: 11379
  misc_feature 1..1376: note = Description of Artificial Sequence: Synthetic polynucleotide
  source 1..1376: mol_type = other DNA

SEQ ID NO: 12405 - DNA, 3843 bp, synthetic construct; identical to SEQ ID NO: 11386
  misc_feature 1..3843: note = Description of Artificial Sequence: Synthetic polynucleotide
  source 1..3843: mol_type = other DNA

SEQ ID NO: 12406 - DNA, 1622 bp, synthetic construct; identical to SEQ ID NO: 11394
  misc_feature 1..1622: note = Description of Artificial Sequence: Synthetic polynucleotide
  source 1..1622: mol_type = other DNA

SEQ ID NO: 12407 - DNA, 1441 bp, synthetic construct; identical to SEQ ID NO: 11405
  misc_feature 1..1441: note = Description of Artificial Sequence: Synthetic polynucleotide
  source 1..1441: mol_type = other DNA

SEQ ID NO: 12408 - DNA, 848 bp, synthetic construct; identical to SEQ ID NO: 11414
  misc_feature 1..848: note = Description of Artificial Sequence: Synthetic polynucleotide
  source 1..848: mol_type = other DNA

SEQ ID NO: 12409 - DNA, 1230 bp, synthetic construct; identical to SEQ ID NO: 11415
  misc_feature 1..1230: note = Description of Artificial Sequence: Synthetic polynucleotide
  source 1..1230: mol_type = other DNA

SEQ ID NO: 12410 - DNA, 2172 bp, synthetic construct; identical to SEQ ID NO: 11430
  misc_feature 1..2172: note = Description of Artificial Sequence: Synthetic polynucleotide
  source 1..2172: mol_type = other DNA

SEQ ID NO: 12411 - DNA, 338 bp, synthetic construct; identical to SEQ ID NO: 11438
  misc_feature 1..338: note = Description of Artificial Sequence: Synthetic polynucleotide
  source 1..338: mol_type = other DNA

SEQ ID NO: 12412 - DNA, 5715 bp, synthetic construct; identical to SEQ ID NO: 11446
  misc_feature 1..5715: note = Description of Artificial Sequence: Synthetic polynucleotide
  source 1..5715: mol_type = other DNA

SEQ ID NO: 12413 - DNA, 1059 bp, synthetic construct; identical to SEQ ID NO: 11452
  misc_feature 1..1059: note = Description of Artificial Sequence: Synthetic polynucleotide
  source 1..1059: mol_type = other DNA

SEQ ID NO: 12414 - DNA, 1503 bp, synthetic construct; identical to SEQ ID NO: 11460
  misc_feature 1..1503: note = Description of Artificial Sequence: Synthetic polynucleotide
  source 1..1503: mol_type = other DNA

SEQ ID NO: 12415 - DNA, 1437 bp, synthetic construct; identical to SEQ ID NO: 11469
  misc_feature 1..1437: note = Description of Artificial Sequence: Synthetic polynucleotide
  source 1..1437: mol_type = other DNA

SEQ ID NO: 12416 - DNA, 1203 bp, synthetic construct; identical to SEQ ID NO: 11478
  misc_feature 1..1203: note = Description of Artificial Sequence: Synthetic polynucleotide
  source 1..1203: mol_type = other DNA

SEQ ID NO: 12417 - DNA, 206 bp, synthetic construct; identical to SEQ ID NO: 11484
  misc_feature 1..206: note = Description of Artificial Sequence: Synthetic polynucleotide
  source 1..206: mol_type = other DNA

SEQ ID NO: 12418 - DNA, 1141 bp, synthetic construct; identical to SEQ ID NO: 11485
  misc_feature 1..1141: note = Description of Artificial Sequence: Synthetic polynucleotide
  source 1..1141: mol_type = other DNA

SEQ ID NO: 12419 - DNA, 1819 bp, synthetic construct; identical to SEQ ID NO: 11486
  misc_feature 1..1819: note = Description of Artificial Sequence: Synthetic polynucleotide
  source 1..1819: mol_type = other DNA

SEQ ID NO: 12420 - DNA, 1813 bp, synthetic construct; identical to SEQ ID NO: 11487
  misc_feature 1..1813: note = Description of Artificial Sequence: Synthetic polynucleotide
  source 1..1813: mol_type = other DNA

SEQ ID NO: 12421 - DNA, 1872 bp, synthetic construct; identical to SEQ ID NO: 11488
  misc_feature 1..1872: note = Description of Artificial Sequence: Synthetic polynucleotide
  source 1..1872: mol_type = other DNA

SEQ ID NO: 12422 - DNA, 652 bp, synthetic construct; identical to SEQ ID NO: 11489
  misc_feature 1..652: note = Description of Artificial Sequence: Synthetic polynucleotide
  source 1..652: mol_type = other DNA

SEQ ID NO: 12423 - DNA, 722 bp, synthetic construct; identical to SEQ ID NO: 11490
  misc_feature 1..722: note = Description of Artificial Sequence: Synthetic polynucleotide
  source 1..722: mol_type = other DNA

SEQ ID NO: 12424 - DNA, 858 bp, synthetic construct; identical to SEQ ID NO: 11491
  misc_feature 1..858: note = Description of Artificial Sequence: Synthetic polynucleotide
  source 1..858: mol_type = other DNA

SEQ ID NO: 12425 - DNA, 598 bp, synthetic construct; identical to SEQ ID NO: 11492
  misc_feature 1..598: note = Description of Artificial Sequence: Synthetic polynucleotide
  source 1..598: mol_type = other DNA

SEQ ID NO: 12426 - DNA, 1281 bp, synthetic construct; identical to SEQ ID NO: 11493
  misc_feature 1..1281: note = Description of Artificial Sequence: Synthetic polynucleotide
  source 1..1281: mol_type = other DNA

SEQ ID NO: 12427 - DNA, 1788 bp, synthetic construct; identical to SEQ ID NO: 11494
  misc_feature 1..1788: note = Description of Artificial Sequence: Synthetic polynucleotide
  source 1..1788: mol_type = other DNA

SEQ ID NO: 12428 - DNA, 626 bp, synthetic construct; identical to SEQ ID NO: 11495
  misc_feature 1..626: note = Description of Artificial Sequence: Synthetic polynucleotide
  source 1..626: mol_type = other DNA

SEQ ID NO: 12429 - DNA, 1037 bp, synthetic construct; identical to SEQ ID NO: 11496
  misc_feature 1..1037: note = Description of Artificial Sequence: Synthetic polynucleotide
  source 1..1037: mol_type = other DNA

SEQ ID NO: 12430 - DNA, 977 bp, synthetic construct; identical to SEQ ID NO: 11497
  misc_feature 1..977: note = Description of Artificial Sequence: Synthetic polynucleotide
  source 1..977: mol_type = other DNA

SEQ ID NO: 12431 - DNA, 6206 bp, synthetic construct; identical to SEQ ID NO: 11498
  misc_feature 1..6206: note = Description of Artificial Sequence: Synthetic polynucleotide
  source 1..6206: mol_type = other DNA

SEQ ID NO: 12432 - DNA, 574 bp, synthetic construct; identical to SEQ ID NO: 11499
  misc_feature 1..574: note = Description of Artificial Sequence: Synthetic polynucleotide
  source 1..574: mol_type = other DNA

SEQ ID NO: 12433 - DNA, 3438 bp, synthetic construct; identical to SEQ ID NO: 11500
  misc_feature 1..3438: note = Description of Artificial Sequence: Synthetic polynucleotide
  source 1..3438: mol_type = other DNA

SEQ ID NO: 12434 - DNA, 4088 bp, synthetic construct; identical to SEQ ID NO: 11501
  misc_feature 1..4088: note = Description of Artificial Sequence: Synthetic polynucleotide
  source 1..4088: mol_type = other DNA

SEQ ID NO: 12435 - DNA, 522 bp, synthetic construct; identical to SEQ ID NO: 11502
  misc_feature 1..522: note = Description of Artificial Sequence: Synthetic polynucleotide
  source 1..522: mol_type = other DNA

SEQ ID NO: 12436 - DNA, 2260 bp, synthetic construct; identical to SEQ ID NO: 11503
  misc_feature 1..2260: note = Description of Artificial Sequence: Synthetic polynucleotide
  source 1..2260: mol_type = other DNA

SEQ ID NO: 12437 - DNA, 1502 bp, synthetic construct; identical to SEQ ID NO: 11504
  misc_feature 1..1502: note = Description of Artificial Sequence: Synthetic polynucleotide
  source 1..1502: mol_type = other DNA

SEQ ID NO: 12438 - DNA, 510 bp, synthetic construct; identical to SEQ ID NO: 11505
  misc_feature 1..510: note = Description of Artificial Sequence: Synthetic polynucleotide
  source 1..510: mol_type = other DNA

SEQ ID NO: 12439 - DNA, 940 bp, synthetic construct; identical to SEQ ID NO: 11506
  misc_feature 1..940: note = Description of Artificial Sequence: Synthetic polynucleotide
  source 1..940: mol_type = other DNA

SEQ ID NO: 12440 - DNA, 2718 bp, synthetic construct; identical to SEQ ID NO: 11507
  misc_feature 1..2718: note = Description of Artificial Sequence: Synthetic polynucleotide
  source 1..2718: mol_type = other DNA

SEQ ID NO: 12441 - DNA, 2661 bp, synthetic construct; identical to SEQ ID NO: 11508
  misc_feature 1..2661: note = Description of Artificial Sequence: Synthetic polynucleotide
  source 1..2661: mol_type = other DNA

SEQ ID NO: 12442 - DNA, 801 bp, synthetic construct; identical to SEQ ID NO: 11509
  misc_feature 1..801: note = Description of Artificial Sequence: Synthetic polynucleotide
  source 1..801: mol_type = other DNA

SEQ ID NO: 12443 - DNA, 311 bp, synthetic construct; identical to SEQ ID NO: 11510
  misc_feature 1..311: note = Description of Artificial Sequence: Synthetic polynucleotide
  source 1..311: mol_type = other DNA

SEQ ID NO: 12444 - DNA, 1048 bp, synthetic construct; identical to SEQ ID NO: 11511
  misc_feature 1..1048: note = Description of Artificial Sequence: Synthetic polynucleotide
  source 1..1048: mol_type = other DNA

SEQ ID NO: 12445 - DNA, 301 bp, synthetic construct; identical to SEQ ID NO: 11512
  misc_feature 1..301: note = Description of Artificial Sequence: Synthetic polynucleotide
  source 1..301: mol_type = other DNA

SEQ ID NO: 12446 - DNA, 1395 bp, synthetic construct; identical to SEQ ID NO: 11513
  misc_feature 1..1395: note = Description of Artificial Sequence: Synthetic polynucleotide
  source 1..1395: mol_type = other DNA

SEQ ID NO: 12447 - DNA, 766 bp, synthetic construct; identical to SEQ ID NO: 11514
  misc_feature 1..766: note = Description of Artificial Sequence: Synthetic polynucleotide
  source 1..766: mol_type = other DNA

SEQ ID NO: 12448 - DNA, 691 bp, synthetic construct; identical to SEQ ID NO: 11515
  misc_feature 1..691: note = Description of Artificial Sequence: Synthetic polynucleotide
  source 1..691: mol_type = other DNA

SEQ ID NO: 12449 - DNA, 1024 bp, synthetic construct; identical to SEQ ID NO: 11516
  misc_feature 1..1024: note = Description of Artificial Sequence: Synthetic polynucleotide
  source 1..1024: mol_type = other DNA

SEQ ID NO: 12450 - DNA, 1339 bp, synthetic construct; identical to SEQ ID NO: 11517
  misc_feature 1..1339: note = Description of Artificial Sequence: Synthetic polynucleotide
  source 1..1339: mol_type = other DNA

SEQ ID NO: 12451 - DNA, 1376 bp, synthetic construct; identical to SEQ ID NO: 11526
  misc_feature 1..1376: note = Description of Artificial Sequence: Synthetic polynucleotide
  source 1..1376: mol_type = other DNA

SEQ ID NO: 12452 - DNA, 3843 bp, synthetic construct; identical to SEQ ID NO: 11533
  misc_feature 1..3843: note = Description of Artificial Sequence: Synthetic polynucleotide
  source 1..3843: mol_type = other DNA

SEQ ID NO: 12453 - DNA, 1622 bp, synthetic construct; identical to SEQ ID NO: 11541
  misc_feature 1..1622: note = Description of Artificial Sequence: Synthetic polynucleotide
  source 1..1622: mol_type = other DNA

SEQ ID NO: 12454 - DNA, 1441 bp, synthetic construct; identical to SEQ ID NO: 11552
  misc_feature 1..1441: note = Description of Artificial Sequence: Synthetic polynucleotide
  source 1..1441: mol_type = other DNA

SEQ ID NO: 12455 - DNA, 383 bp, Homo sapiens; identical to SEQ ID NO: 8556
  source 1..383: mol_type = unassigned DNA

SEQ ID NO: 12456 - DNA, 116 bp, Homo sapiens; identical to SEQ ID NO: 8448
  source 1..116: mol_type = unassigned DNA

SEQ ID NO: 12457 - DNA, 264 bp, Homo sapiens; identical to SEQ ID NO: 8503
  source 1..264: mol_type = unassigned DNA

SEQ ID NO: 12458 - DNA, 521 bp, Homo sapiens; identical to SEQ ID NO: 8546
  source 1..521: mol_type = unassigned DNA

SEQ ID NO: 12459 - DNA, 109 bp, Homo sapiens; identical to SEQ ID NO: 8553
  source 1..109: mol_type = unassigned DNA

SEQ ID NO: 12460 - DNA, 1041 bp, Homo sapiens; identical to SEQ ID NO: 8562
  source 1..1041: mol_type = unassigned DNA

SEQ ID NO: 12461 - DNA, 383 bp, Homo sapiens; identical to SEQ ID NO: 8742
  source 1..383: mol_type = unassigned DNA

SEQ ID NO: 12462 - DNA, 116 bp, Homo sapiens; identical to SEQ ID NO: 8634
  source 1..116: mol_type = unassigned DNA

SEQ ID NO: 12463 - DNA, 264 bp, Homo sapiens; identical to SEQ ID NO: 8689
  source 1..264: mol_type = unassigned DNA

SEQ ID NO: 12464 - DNA, 521 bp, Homo sapiens; identical to SEQ ID NO: 8732
  source 1..521: mol_type = unassigned DNA

SEQ ID NO: 12465 - DNA, 109 bp, Homo sapiens; identical to SEQ ID NO: 8739
  source 1..109: mol_type = unassigned DNA

SEQ ID NO: 12466 - DNA, 1041 bp, Homo sapiens; identical to SEQ ID NO: 8748
  source 1..1041: mol_type = unassigned DNA

SEQ ID NO: 12467 - DNA, 383 bp, synthetic construct; identical to SEQ ID NO: 8928
  misc_feature 1..383: note = Description of Artificial Sequence: Synthetic polynucleotide
  source 1..383: mol_type = other DNA

SEQ ID NO: 12468 - DNA, 116 bp, synthetic construct; identical to SEQ ID NO: 8820
  misc_feature 1..116: note = Description of Artificial Sequence: Synthetic polynucleotide
  source 1..116: mol_type = other DNA

SEQ ID NO: 12469 - DNA, 264 bp, synthetic construct; identical to SEQ ID NO: 8875
  misc_feature 1..264: note = Description of Artificial Sequence: Synthetic polynucleotide
  source 1..264: mol_type = other DNA

SEQ ID NO: 12470 - DNA, 521 bp, synthetic construct; identical to SEQ ID NO: 8918
  misc_feature 1..521: note = Description of Artificial Sequence: Synthetic polynucleotide
  source 1..521: mol_type = other DNA

SEQ ID NO: 12471 - DNA, 109 bp, synthetic construct; identical to SEQ ID NO: 8925
  misc_feature 1..109: note = Description of Artificial Sequence: Synthetic polynucleotide
  source 1..109: mol_type = other DNA

SEQ ID NO: 12472 - DNA, 1041 bp, synthetic construct; identical to SEQ ID NO: 8934
  misc_feature 1..1041: note = Description of Artificial Sequence: Synthetic polynucleotide
  source 1..1041: mol_type = other DNA

SEQ ID NO: 12473 - DNA, 383 bp, synthetic construct; identical to SEQ ID NO: 9114
  misc_feature 1..383: note = Description of Artificial Sequence: Synthetic polynucleotide
  source 1..383: mol_type = other DNA

SEQ ID NO: 12474 - DNA, 116 bp, synthetic construct; identical to SEQ ID NO: 9006
  misc_feature 1..116: note = Description of Artificial Sequence: Synthetic polynucleotide
  source 1..116: mol_type = other DNA

SEQ ID NO: 12475 - DNA, 264 bp, synthetic construct; identical to SEQ ID NO: 9061
  misc_feature 1..264: note = Description of Artificial Sequence: Synthetic polynucleotide
  source 1..264: mol_type = other DNA

SEQ ID NO: 12476 - DNA, 521 bp, synthetic construct; identical to SEQ ID NO: 9104
  misc_feature 1..521: note = Description of Artificial Sequence: Synthetic polynucleotide
  source 1..521: mol_type = other DNA

SEQ ID NO: 12477 - DNA, 109 bp, synthetic construct; identical to SEQ ID NO: 9111
  misc_feature 1..109: note = Description of Artificial Sequence: Synthetic polynucleotide
  source 1..109: mol_type = other DNA

SEQ ID NO: 12478 - DNA, 1041 bp, synthetic construct; identical to SEQ ID NO: 9120
  misc_feature 1..1041: note = Description of Artificial Sequence: Synthetic polynucleotide
  source 1..1041: mol_type = other DNA

SEQ ID NO: 12479 - DNA, 383 bp, synthetic construct; identical to SEQ ID NO: 9300
  misc_feature 1..383: note = Description of Artificial Sequence: Synthetic polynucleotide
  source 1..383: mol_type = other DNA

SEQ ID NO: 12480 - DNA, 116 bp, synthetic construct; identical to SEQ ID NO: 9192
  misc_feature 1..116: note = Description of Artificial Sequence: Synthetic polynucleotide
  source 1..116: mol_type = other DNA

SEQ ID NO: 12481 - DNA, 264 bp, synthetic construct; identical to SEQ ID NO: 9247
  misc_feature 1..264: note = Description of Artificial Sequence: Synthetic polynucleotide
  source 1..264: mol_type = other DNA

SEQ ID NO: 12482 - DNA, 521 bp, synthetic construct; identical to SEQ ID NO: 9290
  misc_feature 1..521: note = Description of Artificial Sequence: Synthetic polynucleotide
  source 1..521: mol_type = other DNA

SEQ ID NO: 12483 - DNA, 109 bp, synthetic construct; identical to SEQ ID NO: 9297
  misc_feature 1..109: note = Description of Artificial Sequence: Synthetic polynucleotide
  source 1..109: mol_type = other DNA

SEQ ID NO: 12484 - DNA, 1041 bp, synthetic construct; identical to SEQ ID NO: 9306
  misc_feature 1..1041: note = Description of Artificial Sequence: Synthetic polynucleotide
  source 1..1041: mol_type = other DNA

SEQ ID NO: 12485 - DNA, 383 bp, synthetic construct; identical to SEQ ID NO: 9486
  misc_feature 1..383: note = Description of Artificial Sequence: Synthetic polynucleotide
  source 1..383: mol_type = other DNA

SEQ ID NO: 12486 - DNA, 116 bp, synthetic construct; identical to SEQ ID NO: 9378
  misc_feature 1..116: note = Description of Artificial Sequence: Synthetic polynucleotide
  source 1..116: mol_type = other DNA

SEQ ID NO: 12487 - DNA, 264 bp, synthetic construct; identical to SEQ ID NO: 9433
  misc_feature 1..264: note = Description of Artificial Sequence: Synthetic polynucleotide
  source 1..264: mol_type = other DNA

SEQ ID NO: 12488 - DNA, 521 bp, synthetic construct; identical to SEQ ID NO: 9476
  misc_feature 1..521: note = Description of Artificial Sequence: Synthetic polynucleotide
  source 1..521: mol_type = other DNA

SEQ ID NO: 12489 - DNA, 109 bp, synthetic construct; identical to SEQ ID NO: 9483
  misc_feature 1..109: note = Description of Artificial Sequence: Synthetic polynucleotide
  source 1..109: mol_type = other DNA

SEQ ID NO: 12490 - DNA, 1041 bp, synthetic construct; identical to SEQ ID NO: 9492
  misc_feature 1..1041: note = Description of Artificial Sequence: Synthetic polynucleotide
  source 1..1041: mol_type = other DNA

SEQ ID NO: 12491 - DNA, 582 bp, Homo sapiens; identical to SEQ ID NO: 9672
  source 1..582: mol_type = unassigned DNA

SEQ ID NO: 12492 - DNA, 315 bp, Homo sapiens; identical to SEQ ID NO: 9564
  source 1..315: mol_type = unassigned DNA

SEQ ID NO: 12493 - DNA, 463 bp, Homo sapiens; identical to SEQ ID NO: 9619
  source 1..463: mol_type = unassigned DNA

SEQ ID NO: 12494 - DNA, 720 bp, Homo sapiens; identical to SEQ ID NO: 9662
  source 1..720: mol_type = unassigned DNA

SEQ ID NO: 12495 - DNA, 308 bp, Homo sapiens; identical to SEQ ID NO: 9669
  source 1..308: mol_type = unassigned DNA

SEQ ID NO: 12496 - DNA, 1240 bp, Homo sapiens; identical to SEQ ID NO: 9678
  source 1..1240: mol_type = unassigned DNA

SEQ ID NO: 12497 - DNA, 582 bp, Homo sapiens; identical to SEQ ID NO: 9858
  source 1..582: mol_type = unassigned DNA

SEQ ID NO: 12498 - DNA, 315 bp, Homo sapiens; identical to SEQ ID NO: 9750
  source 1..315: mol_type = unassigned DNA

SEQ ID NO: 12499 - DNA, 463 bp, Homo sapiens; identical to SEQ ID NO: 9805
  source 1..463: mol_type = unassigned DNA

SEQ ID NO: 12500 - DNA, 720 bp, Homo sapiens; identical to SEQ ID NO: 9848
  source 1..720: mol_type = unassigned DNA

SEQ ID NO: 12501 - DNA, 308 bp, Homo sapiens; identical to SEQ ID NO: 9855
  source 1..308: mol_type = unassigned DNA

SEQ ID NO: 12502 - DNA, 1240 bp, Homo sapiens; identical to SEQ ID NO: 9864
  source 1..1240: mol_type = unassigned DNA

SEQ ID NO: 12503 - DNA, 582 bp, synthetic construct; identical to SEQ ID NO: 10044
  misc_feature 1..582: note = Description of Artificial Sequence: Synthetic polynucleotide
  source 1..582: mol_type = other DNA

SEQ ID NO: 12504 - DNA, 315 bp, synthetic construct; identical to SEQ ID NO: 9936
  misc_feature 1..315: note = Description of Artificial Sequence: Synthetic polynucleotide
  source 1..315: mol_type = other DNA

SEQ ID NO: 12505 - DNA, 463 bp, synthetic construct; identical to SEQ ID NO: 9991
  misc_feature 1..463: note = Description of Artificial Sequence: Synthetic polynucleotide
  source 1..463: mol_type = other DNA

SEQ ID NO: 12506 - DNA, 720 bp, synthetic construct; identical to SEQ ID NO: 10034
  misc_feature 1..720: note = Description of Artificial Sequence: Synthetic polynucleotide
  source 1..720: mol_type = other DNA

SEQ ID NO: 12507 - DNA, 308 bp, synthetic construct; identical to SEQ ID NO: 10041
  misc_feature 1..308: note = Description of Artificial Sequence: Synthetic polynucleotide
  source 1..308: mol_type = other DNA

SEQ ID NO: 12508 - DNA, 1240 bp, synthetic construct; identical to SEQ ID NO: 10050
  misc_feature 1..1240: note = Description of Artificial Sequence: Synthetic polynucleotide
  source 1..1240: mol_type = other DNA

SEQ ID NO: 12509 - DNA, 582 bp, synthetic construct; identical to SEQ ID NO: 10230
  misc_feature 1..582: note = Description of Artificial Sequence: Synthetic polynucleotide
  source 1..582: mol_type = other DNA

SEQ ID NO: 12510 - DNA, 315 bp, synthetic construct; identical to SEQ ID NO: 10122
  misc_feature 1..315: note = Description of Artificial Sequence: Synthetic polynucleotide
  source 1..315: mol_type = other DNA

SEQ ID NO: 12511 - DNA, 463 bp, synthetic construct; identical to SEQ ID NO: 10177
  misc_feature 1..463: note = Description of Artificial Sequence: Synthetic polynucleotide
  source 1..463: mol_type = other DNA

SEQ ID NO: 12512 - DNA, 720 bp, synthetic construct; identical to SEQ ID NO: 10220
  misc_feature 1..720: note = Description of Artificial Sequence: Synthetic polynucleotide
  source 1..720: mol_type = other DNA

SEQ ID NO: 12513 - DNA, 308 bp, synthetic construct; identical to SEQ ID NO: 10227
  misc_feature 1..308: note = Description of Artificial Sequence: Synthetic polynucleotide
  source 1..308: mol_type = other DNA

SEQ ID NO: 12514 - DNA, 1240 bp, synthetic construct; identical to SEQ ID NO: 10236
  misc_feature 1..1240: note = Description of Artificial Sequence: Synthetic polynucleotide
  source 1..1240: mol_type = other DNA

SEQ ID NO: 12515 - DNA, 582 bp, synthetic construct; identical to SEQ ID NO: 10416
  misc_feature 1..582: note = Description of Artificial Sequence: Synthetic polynucleotide
  source 1..582: mol_type = other DNA

SEQ ID NO: 12516 - DNA, 315 bp, synthetic construct; identical to SEQ ID NO: 10308
  misc_feature 1..315: note = Description of Artificial Sequence: Synthetic polynucleotide
  source 1..315: mol_type = other DNA

SEQ ID NO: 12517 - DNA, 463 bp, synthetic construct; identical to SEQ ID NO: 10363
  misc_feature 1..463: note = Description of Artificial Sequence: Synthetic polynucleotide
  source 1..463: mol_type = other DNA

SEQ ID NO: 12518 - DNA, 720 bp, synthetic construct; identical to SEQ ID NO: 10406
  misc_feature 1..720: note = Description of Artificial Sequence: Synthetic polynucleotide
  source 1..720: mol_type = other DNA

SEQ ID NO: 12519 - DNA, 308 bp, synthetic construct; identical to SEQ ID NO: 10413
  misc_feature 1..308: note = Description of Artificial Sequence: Synthetic polynucleotide
  source 1..308: mol_type = other DNA

SEQ ID NO: 12520 - DNA, 1240 bp, synthetic construct; identical to SEQ ID NO: 10422
  misc_feature 1..1240: note = Description of Artificial Sequence: Synthetic polynucleotide
  source 1..1240: mol_type = other DNA

SEQ ID NO: 12521 - DNA, 582 bp, synthetic construct; identical to SEQ ID NO: 10602
  misc_feature 1..582: note = Description of Artificial Sequence: Synthetic polynucleotide
  source 1..582: mol_type = other DNA

SEQ ID NO: 12522 - DNA, 315 bp, synthetic construct; identical to SEQ ID NO: 10494
  misc_feature 1..315: note = Description of Artificial Sequence: Synthetic polynucleotide
  source 1..315: mol_type = other DNA

SEQ ID NO: 12523 - DNA, 463 bp, synthetic construct; identical to SEQ ID NO: 10549
  misc_feature 1..463: note = Description of Artificial Sequence: Synthetic polynucleotide
  source 1..463: mol_type = other DNA

SEQ ID NO: 12524 - DNA, 720 bp, synthetic construct; identical to SEQ ID NO: 10592
  misc_feature 1..720: note = Description of Artificial Sequence: Synthetic polynucleotide
  source 1..720: mol_type = other DNA

SEQ ID NO: 12525 - DNA, 308 bp, synthetic construct; identical to SEQ ID NO: 10599
  misc_feature 1..308: note = Description of Artificial Sequence: Synthetic polynucleotide
  source 1..308: mol_type = other DNA

SEQ ID NO: 12526 - DNA, 1240 bp, synthetic construct; identical to SEQ ID NO: 10608
  misc_feature 1..1240: note = Description of Artificial Sequence: Synthetic polynucleotide
  source 1..1240: mol_type = other DNA

SEQ ID NO: 12527 - DNA, 1788 bp, Homo sapiens; identical to SEQ ID NO: 10759
  source 1..1788: mol_type = unassigned DNA

SEQ ID NO: 12528 - DNA, 1230 bp, Homo sapiens; identical to SEQ ID NO: 10680
  source 1..1230: mol_type = unassigned DNA

SEQ ID NO: 12529 - DNA, 1059 bp, Homo sapiens; identical to SEQ ID NO: 10717
  source 1..1059: mol_type = unassigned DNA

SEQ ID NO: 12530 - DNA, 1819 bp, Homo sapiens; identical to SEQ ID NO: 10751
  source 1..1819: mol_type = unassigned DNA

SEQ ID NO: 12531 - DNA, 598 bp, Homo sapiens; identical to SEQ ID NO: 10757
  source 1..598: mol_type = unassigned DNA

SEQ ID NO: 12532 - DNA, 3438 bp, Homo sapiens; identical to SEQ ID NO: 10765
  source 1..3438: mol_type = unassigned DNA

SEQ ID NO: 12533 - DNA, 1788 bp, Homo sapiens; identical to SEQ ID NO: 10906
  source 1..1788: mol_type = unassigned DNA

SEQ ID NO: 12534 - DNA, 1230 bp, Homo sapiens; identical to SEQ ID NO: 10827
  source 1..1230: mol_type = unassigned DNA

SEQ ID NO: 12535 - DNA, 1059 bp, Homo sapiens; identical to SEQ ID NO: 10864
  source 1..1059: mol_type = unassigned DNA

SEQ ID NO: 12536 - DNA, 1819 bp, Homo sapiens; identical to SEQ ID NO: 10898
  source 1..1819: mol_type = unassigned DNA

SEQ ID NO: 12537 - DNA, 598 bp, Homo sapiens; identical to SEQ ID NO: 10904
  source 1..598: mol_type = unassigned DNA

SEQ ID NO: 12538 - DNA, 3438 bp, Homo sapiens; identical to SEQ ID NO: 10912
  source 1..3438: mol_type = unassigned DNA

SEQ ID NO: 12539 - DNA, 1788 bp, synthetic construct; identical to SEQ ID NO: 11053
  misc_feature 1..1788: note = Description of Artificial Sequence: Synthetic polynucleotide
  source 1..1788: mol_type = other DNA

SEQ ID NO: 12540 - DNA, 1230 bp, synthetic construct; identical to SEQ ID NO: 10974
  misc_feature 1..1230: note = Description of Artificial Sequence: Synthetic polynucleotide
  source 1..1230: mol_type = other DNA

SEQ ID NO: 12541 - DNA, 1059 bp, synthetic construct; identical to SEQ ID NO: 11011
  misc_feature 1..1059: note = Description of Artificial Sequence: Synthetic polynucleotide
  source 1..1059: mol_type = other DNA

SEQ ID NO: 12542 - DNA, 1819 bp, synthetic construct; identical to SEQ ID NO: 11045
  misc_feature 1..1819: note = Description of Artificial Sequence: Synthetic polynucleotide
  source 1..1819: mol_type = other DNA

SEQ ID NO: 12543 - DNA, 598 bp, synthetic construct; identical to SEQ ID NO: 11051
  misc_feature 1..598: note = Description of Artificial Sequence: Synthetic polynucleotide
  source 1..598: mol_type = other DNA

SEQ ID NO: 12544 - DNA, 3438 bp, synthetic construct; identical to SEQ ID NO: 11059
  misc_feature 1..3438: note = Description of Artificial Sequence: Synthetic polynucleotide
  source 1..3438: mol_type = other DNA

SEQ ID NO: 12545 - DNA, 1788 bp, synthetic construct; identical to SEQ ID NO: 11200
  misc_feature 1..1788: note = Description of Artificial Sequence: Synthetic polynucleotide
  source 1..1788: mol_type = other DNA

SEQ ID NO: 12546 - DNA, 1230 bp, synthetic construct; identical to SEQ ID NO: 11121
  misc_feature 1..1230: note = Description of Artificial Sequence: Synthetic polynucleotide
  source 1..1230: mol_type = other DNA

SEQ ID NO: 12547 - DNA, 1059 bp, synthetic construct; identical to SEQ ID NO: 11158
  misc_feature 1..1059: note = Description of Artificial Sequence: Synthetic polynucleotide
  source 1..1059: mol_type = other DNA

SEQ ID NO: 12548 - DNA, 1819 bp, synthetic construct; identical to SEQ ID NO: 11192
  misc_feature 1..1819: note = Description of Artificial Sequence: Synthetic polynucleotide
  source 1..1819: mol_type = other DNA

SEQ ID NO: 12549 - DNA, 598 bp, synthetic construct; identical to SEQ ID NO: 11198
  misc_feature 1..598: note = Description of Artificial Sequence: Synthetic polynucleotide
  source 1..598: mol_type = other DNA

SEQ ID NO: 12550 - DNA, 3438 bp, synthetic construct; identical to SEQ ID NO: 11206
  misc_feature 1..3438: note = Description of Artificial Sequence: Synthetic polynucleotide
  source 1..3438: mol_type = other DNA

SEQ ID NO: 12551 - DNA, 1788 bp, synthetic construct; identical to SEQ ID NO: 11347
  misc_feature 1..1788: note = Description of Artificial Sequence: Synthetic polynucleotide
  source 1..1788: mol_type = other DNA

SEQ ID NO: 12552 - DNA, 1230 bp, synthetic construct; identical to SEQ ID NO: 11268
  misc_feature 1..1230: note = Description of Artificial Sequence: Synthetic polynucleotide
  source 1..1230: mol_type = other DNA

SEQ ID NO: 12553 - DNA, 1059 bp, synthetic construct; identical to SEQ ID NO: 11305
  misc_feature 1..1059: note = Description of Artificial Sequence: Synthetic polynucleotide
  source 1..1059: mol_type = other DNA

SEQ ID NO: 12554 - DNA, 1819 bp, synthetic construct; identical to SEQ ID NO: 11339
  misc_feature 1..1819: note = Description of Artificial Sequence: Synthetic polynucleotide
  source 1..1819: mol_type = other DNA

SEQ ID NO: 12555 - DNA, 598 bp, synthetic construct; identical to SEQ ID NO: 11345
  misc_feature 1..598: note = Description of Artificial Sequence: Synthetic polynucleotide
  source 1..598: mol_type = other DNA

SEQ ID NO: 12556 - DNA, 3438 bp, synthetic construct; identical to SEQ ID NO: 11353
  misc_feature 1..3438: note = Description of Artificial Sequence: Synthetic polynucleotide
  source 1..3438: mol_type = other DNA

SEQ ID NO: 12557 - DNA, 1788 bp, synthetic construct; identical to SEQ ID NO: 11494
  misc_feature 1..1788: note = Description of Artificial Sequence: Synthetic polynucleotide
  source 1..1788: mol_type = other DNA

SEQ ID NO: 12558 - DNA, 1230 bp, synthetic construct; identical to SEQ ID NO: 11415
  misc_feature 1..1230: note = Description of Artificial Sequence: Synthetic polynucleotide
  source 1..1230: mol_type = other DNA

SEQ ID NO: 12559 - DNA, 1059 bp, synthetic construct; identical to SEQ ID NO: 11452
  misc_feature 1..1059: note = Description of Artificial Sequence: Synthetic polynucleotide
  source 1..1059: mol_type = other DNA

SEQ ID NO: 12560 - DNA, 1819 bp, synthetic construct; identical to SEQ ID NO: 11486
  misc_feature 1..1819: note = Description of Artificial Sequence: Synthetic polynucleotide
  source 1..1819: mol_type = other DNA

SEQ ID NO: 12561 - DNA, 598 bp, synthetic construct; identical to SEQ ID NO: 11492
  misc_feature 1..598: note = Description of Artificial Sequence: Synthetic polynucleotide
  source 1..598: mol_type = other DNA

SEQ ID NO: 12562 - DNA, 3438 bp, synthetic construct; identical to SEQ ID NO: 11500
  misc_feature 1..3438: note = Description of Artificial Sequence: Synthetic polynucleotide
  source 1..3438: mol_type = other DNA

SEQ ID NO: 12563 - DNA, 782 bp, Homo sapiens
  source 1..782: mol_type = unassigned DNA
gcgcttccgagccacgcagaggcgccccctcccgccggagacgggaaagccccggcgcccccagactgggctccgtttccagctcccggaggggctggggctctcccgcgtgcgccccgcacctgccgggggcccgtacccgccctcgccggggctccagggggcacgacggccgtggcccggcgctcttgggaggggagcgggacatccccgaaggcggcgcgctggaggcggggagcggccggggcgcacggagagggcggggagcccgcgggagggggaggagggggaggagggggaggaggcgcgaggtgggggggagcgcggcgggcggcagggagggagcgggagggaggcaagaaagtagcagaaagtgaggctggcaggcggcggcaaaggagccggcgcgcggcggcggcaggaagtctgtgcccgagaacagcagaaataagagccagggagggaccgcggccgcggcggcggcggcgagagcgaaagaggaaactgcagaggaggaagctgcgccgcagcccgagccgcccggcatccccgccgcctctgcgcccgcgccgcgcccccggcgccccctccccagcgcgcccccggccgctcctccgcgccgcgctcgtcggccatggcccgggagaacggcgagagcagctcctcctggaaaaagcaagctgaagacatcaagaagatcttcgagttcaaagagaccctcggaacgtaagtggggaccggggaggcgagggtggaggtggccgcggcaggggctgcacggg

SEQ ID NO: 12564 - DNA, 615 bp, Homo sapiens
  source 1..615: mol_type = unassigned DNA
ccgtgactctccctacctccccgactccccaggcttcttacagtgacctcttaccgtgccccactccatgaatcgccagagctattcgtccctaaatttcaaaccttgcgcaatgtcccttcacagacccctccaggtatcacgcagccccgagccccgagccccgccccgggggcctcatcccgccccttcgcgtccgcggctcgttttcccccactgagcgcccagctcccgcagtttccccggccgtcgagcgccgtgggcggggctccagggcggcggcgcctcgcggggagggtcctccgtgctgggggcgaggccacccgaggcagctccccgcccgcccccaaccccgccccgctctcggagcctataaagggaggcgacccgcggcccgcccggctggcatcccccagccgccgccagccccgccgaggggagccagcgccgtctctgaggggcgtccggcgccggagccatgaccctccgccgactcaggaagctgcagcagaaggaggaggcggcggccaccccggaccccgccgcccggactcccgactcggaagtcgcgcccgccgctccggtcccgaccccgggaccccctgccgcagccgc

SEQ ID NO: 12565 - DNA, 763 bp, Homo sapiens
  source 1..763: mol_type = unassigned DNA
gggaacgagacactgctgagctggaagacttcgcgggccacaggcacagccttcctgctgctggcggcgctgctggggctgcctggcaacggcttcgtggtgtggagcttggcgggctggcggcctgcacgggggcgaccgctggcggccacgcttgtgctgcacctggcgctggccgacggcgcggtgctgctgctcacgccgctctttgtggccttcctgacccggcaggcctggccgctgggccaggcgggctgcaaggcggtgtactacgtgtgcgcgctcagcatgtacgccagcgtgctgctcaccggcctgctcagcctgcagcgctgcctcgcagtcacccgccccttcctggcgcctcggctgcgcagcccggccctggcccgccgcctgctgctggcggtctggctggccgccctgttgctcgccgtcccggccgccgtctaccgccacctgtggagggaccgcgtatgccagctgtgccacccgtcgccggtccacgccgccgcccacctgagcctggagactctgaccgctttcgtgcttcctttcgggctgatgctcggctgctacagcgtgacgctggcacggctgcggggcgcccgctggggctccgggcggcacggggcgcgggtgggccggctggtgagcgccatcgtgcttgccttcggcttgctctgggccccctaccacgcagtcaaccttctgcaggcggtcgcagcgctggctccaccggaaggggccttggcgaagctgg

SEQ ID NO: 12566 - DNA, 1020 bp, Homo sapiens
  source 1..1020: mol_type = unassigned DNA
ttggggcagctccctttctgctcactcactgcctagctccttccttcacaccttccttcggaaacgtctgctcctgacaaggtctacttcctgctctcaggaggcccttattgtggaggaagggaggcgtcgcccgtccctggcttctctgacagccgtgttccatccccgccctgtgccccttctcccggacagtgccttctccagggctcacccaggagggtgcagcggtggcccccggggcggtggtcgtggtgggggtgttagctgcaggggtgccctcggtgggtgggagttggtggcctctcgctggtgccatgggactcgcatgttcgccctgcgcccctcggctcttgagcccacaggccgggatcctgcctgccagccgcgtgcgctgccgtttaacccttgcaggcgcagagcgcgcggcggcggtgacagagaactttgtttggctgcccaaatacagcctcctgcagaaggaccctgcgcccggggaaggggaggaatctcttcccctctgggcgcccgccctcctcgccatggcccggcctccacatccgcccacatctggccgcagcggggcgcccggggggaggggctgaggccgcgtctctcgccgtcccctgggcgcgggccaggcggggaggaggggggcgctccggtcgtgtgcccaggactgtcccccagcggccactcgggccccagccccccaggcctggccttgacaggcgggcggagcagccagtgcgagacagggaggccggtgcgggtgcgggaacctgatccgcccgggaggcgggggcggggcgggggcgcagcgcgcggggaggggccggcgcccgccttcctcccccattcattcagctgagccagggggcctaggggctcctccggcggctagctctgcactgcaggagcgcgggcgcggcgccccagccagcgcgcagggcccgggccccgccgggggcgcttcctcgccgctgccctccgcgcgacccgctgcccaccagccatcat

SEQ ID NO: 12567 - DNA, 608 bp, Homo sapiens
  source 1..608: mol_type = unassigned DNA
gcgggtcccaccctctctcctgccaggggtagaccctgggaccactcagctcgctctcgcaggccctgagcgtctgacgcctgcgcactgagcgcgggcgggcgggcactcccagaaacctccggggcgctgcaggcgggacaagcaggttccacaggccgagcccacgagcccctcgaggggtgagcggcccgggcctcctggcgttctggccggctagccaagcgctggactacatttcccagaggcacggcgtccggagcgctggactacatttcccagaggcaccgctcccggagcgtagcttcatttccgttagtttgcgagatttggaggcctcgcgtggggagagggccgcgtctgtggaggagcttggctccgcacctgctgggctggcgaacccgaaattgggcttggaacccgggagccagatcttggaccctgaactgcacctctgtcaaggtaggagtgtccgggatgccggagcggacacgcgcggagaaagcgtcgctggggttactcgtgtggccgtgtctccggttttgtgtgcaggctacagcctgcctggtattggcgactgcctgtgcatacacgactggacgtgtgtg

SEQ ID NO: 12568 - DNA, 1539 bp, Homo sapiens
  source 1..1539: mol_type = unassigned DNA
tctggccccatgctcagctccgcggccatcgctgaagcgaggcgcagccgccgctgccgcccgggaaactttgcggccggccggagcgcgccgagccaagcgcgggggggaagagcggagaagagctggggaggcggggagcgagggcgcagcgggccggggccgccggccaagcctttgtctggggacgcggcggcgcgccggagagtcccgaggctgcctgcaccgccccagagctctgggctgtgcccgcgcagggaccgggccgggtagagtcgggcggggtggagaggcaagcggagcgcgcggtggggctgaggggaggcgtggggcgagtgcccgttgctcgctctctagctctcttgctcttacgctctctcgctcgcagccgctcgcagctcggcggtgcagctgtgctggatccggcggcgccgcagccttttatcgcctcctgatgtcactggggtgcgggggcccgggcggcccggtgcgcgggccaatagctgcacggcctccgcggcccagcggcgcagggcggggcgcgcctgacagctcccccgccccccgcgtcagctgactggcggcccgagcggccccggagcggcggaggcctggcggagcgctggagcggagtgggacggccagcctgggcccacccccgtaccctgcaggtcccggcccacgcacgctcgcctggagtgcgcgccccacctctaggccaaatcaccgctttcccctcctcgcgcactctcctccctcagttccctttgcaccccacccccatcccgtgtcacccccaaggaggctcagaatgagcgccgggacaacgcctcctgggccctttgttcccaagcggcccccgcccagtgggcgacgctctgtgtgtcctcgcggcttctggccgtgtgtgtcgtgcgttcctgtttctggagatctgcgcgtatttgtatgttggggagggcgggctcgaggctccgagagttgtgttcagacccaactcttaacctcaggggacctttctcaggccaagcgagggcccctcctggcgggtgcagtcgcagagccctgaggttcgactccactggccccgccgctccccgcgttcaccccaccgcacaatgttcacagtgaaggcgacgggaaaagcagcagcccaaaggctctgaattcctcttccccgccacacgcacggaatcctgagcccccggagcctcggggccgaggccggcccgggacggtgctccgagtagctctccactgctggggagccggccctgtttttgtttgaacgttttgtaacgattaagcagatcccggcgtcagcccgccgcggagaggctcaaacaggcataaagtgcgaccccaagtggccactgtgcgcaaaggcgccgcgaccgcccggcccacggccggaaggcttggacggcgcctcgtacccagccaggtctcccctacctggcccaacccaagccagcccagaacgcatactatgtgtgcaccagagcccaggacaggttcccctcgagcgatgtacaggtc

SEQ ID NO: 12569 - DNA, 782 bp, synthetic construct
  misc_feature 1..782: note = Description of Artificial Sequence: Synthetic polynucleotide
  source 1..782: mol_type = other DNA
gygttttygagttaygtagaggygttttttttygtyggagaygggaaagtttyggygtttttagattgggtttygtttttagttttyggaggggttggggttttttygygtgygtttygtatttgtygggggttygtattygttttygtyggggttttagggggtaygayggtygtggttyggygtttttgggaggggagygggatattttygaaggyggygygttggaggyggggagyggtyggggygtayggagagggyggggagttygygggagggggaggagggggaggagggggaggaggygygaggtgggggggagygyggygggyggtagggagggagygggagggaggtaagaaagtagtagaaagtgaggttggtaggyggyggtaaaggagtyggygygyggyggyggtaggaagtttgtgttygagaatagtagaaataagagttagggagggatygyggtygyggyggyggyggygagagygaaagaggaaattgtagaggaggaagttgygtygtagttygagtygttyggtattttygtygtttttgygttygygtygygttttyggygttttttttttagygygttttyggtygttttttygygtygygttygtyggttatggttygggagaayggygagagtagttttttttggaaaaagtaagttgaagatattaagaagattttygagtttaaagagattttyggaaygtaagtggggatyggggaggygagggtggaggtggtygyggtaggggttgtayggg

SEQ ID NO: 12570 - DNA, 615 bp, synthetic construct
  misc_feature 1..615: note = Description of Artificial Sequence: Synthetic polynucleotide
  source 1..615: mol_type = other DNA
tygtgattttttttattttttygattttttaggttttttatagtgattttttatygtgttttattttatgaatygttagagttattygtttttaaattttaaattttgygtaatgtttttttatagatttttttaggtattaygtagtttygagtttygagtttygtttygggggttttatttygttttttygygttygyggttygtttttttttattgagygtttagttttygtagttttttyggtygtygagygtygtgggyggggttttagggyggyggygtttygyggggagggtttttygtgttgggggygaggttattygaggtagtttttygttygtttttaatttygtttygttttyggagtttataaagggaggygattygyggttygttyggttggtattttttagtygtygttagtttygtygaggggagttagygtygtttttgaggggygttyggygtyggagttatgatttttygtygatttaggaagttgtagtagaaggaggaggyggyggttatttyggatttygtygttyggattttygattyggaagtygygttygtygtttyggtttygatttygggattttttgtygtagtygt

SEQ ID NO: 12571 - DNA, 763 bp, synthetic construct
  misc_feature 1..763: note = Description of Artificial Sequence: Synthetic polynucleotide
  source 1..763: mol_type = other DNA
gggaaygagatattgttgagttggaagatttygygggttataggtatagtttttttgttgttggyggygttgttggggttgtttggtaayggtttygtggtgtggagtttggygggttggyggtttgtaygggggygatygttggyggttaygtttgtgttgtatttggygttggtygayggygyggtgttgttgtttaygtygttttttgtggtttttttgattyggtaggtttggtygttgggttaggygggttgtaaggyggtgtattaygtgtgygygtttagtatgtaygttagygtgttgtttatyggtttgtttagtttgtagygttgtttygtagttattygtttttttttggygtttyggttgygtagttyggttttggttygtygtttgttgttggyggtttggttggtygttttgttgttygtygtttyggtygtygtttatygttatttgtggagggatygygtatgttagttgtgttattygtygtyggtttaygtygtygtttatttgagtttggagattttgatygttttygtgttttttttygggttgatgttyggttgttatagygtgaygttggtayggttgyggggygttygttggggtttygggyggtayggggygygggtgggtyggttggtgagygttatygtgtttgttttyggtttgttttgggttttttattaygtagttaattttttgtaggyggtygtagygttggttttatyggaaggggttttggygaagttgg

SEQ ID NO: 12572 - DNA, 1020 bp, synthetic construct
  misc_feature 1..1020: note = Description of Artificial Sequence: Synthetic polynucleotide
  source 1..1020: mol_type = other DNA
ttggggtagttttttttttgtttatttattgtttagtttttttttttatattttttttyggaaaygtttgtttttgataaggtttattttttgtttttaggaggtttttattgtggaggaagggaggygtygttygtttttggtttttttgatagtygtgttttattttygttttgtgttttttttttyggatagtgttttttttagggtttatttaggagggtgtagyggtggttttyggggyggtggtygtggtgggggtgttagttgtaggggtgttttyggtgggtgggagttggtggtttttygttggtgttatgggattygtatgttygttttgygtttttyggtttttgagtttataggtygggattttgtttgttagtygygtgygttgtygtttaatttttgtaggygtagagygygyggyggyggtgatagagaattttgtttggttgtttaaatatagttttttgtagaaggattttgygttyggggaaggggaggaatttttttttttttgggygttygtttttttygttatggttyggtttttatattygtttatatttggtygtagyggggygttyggggggaggggttgaggtygygtttttygtygttttttgggygygggttaggyggggaggaggggggygtttyggtygtgtgtttaggattgttttttagyggttattygggttttagttttttaggtttggttttgataggygggyggagtagttagtgygagatagggaggtyggtgygggtgygggaatttgattygttygggaggygggggyggggygggggygtagygygyggggaggggtyggygttygttttttttttttatttatttagttgagttagggggtttaggggttttttyggyggttagttttgtattgtaggagygygggygyggygttttagttagygygtagggttygggtttygtygggggygttttttygtygttgtttttygygygattygttgtttattagttattat

SEQ ID NO: 12573 - DNA, 608 bp, synthetic construct
  misc_feature 1..608: note = Description of Artificial Sequence: Synthetic polynucleotide
  source 1..608: mol_type = other DNA
gygggttttatttttttttttgttaggggtagattttgggattatttagttygttttygtaggttttgagygtttgaygtttgygtattgagygygggygggygggtatttttagaaattttyggggygttgtaggygggataagtaggttttataggtygagtttaygagtttttygaggggtgagyggttygggttttttggygttttggtyggttagttaagygttggattatattttttagaggtayggygttyggagygttggattatattttttagaggtatygttttyggagygtagttttattttygttagtttgygagatttggaggtttygygtggggagagggtygygtttgtggaggagtttggtttygtatttgttgggttggygaattygaaattgggtttggaattygggagttagattttggattttgaattgtatttttgttaaggtaggagtgttygggatgtyggagyggataygygyggagaaagygtygttggggttattygtgtggtygtgttttyggttttgtgtgtaggttatagtttgtttggtattggygattgtttgtgtatataygattggaygtgtgtg

SEQ ID NO: 12574 - DNA, 1539 bp, synthetic construct
  misc_feature 1..1539: note = Description of Artificial Sequence: Synthetic polynucleotide
  source 1..1539: mol_type = other DNA
tttggttttatgtttagtttygyggttatygttgaagygaggygtagtygtygttgtygttygggaaattttgyggtyggtyggagygygtygagttaagygygggggggaagagyggagaagagttggggaggyggggagygagggygtagygggtyggggtygtyggttaagtttttgtttggggaygyggyggygygtyggagagtttygaggttgtttgtatygttttagagttttgggttgtgttygygtagggatygggtygggtagagtygggyggggtggagaggtaagyggagygygyggtggggttgaggggaggygtggggygagtgttygttgttygttttttagtttttttgtttttaygttttttygttygtagtygttygtagttyggyggtgtagttgtgttggattyggyggygtygtagttttttatygttttttgatgttattggggtgygggggttygggyggttyggtgygygggttaatagttgtayggttttygyggtttagyggygtagggyggggygygtttgatagttttttygtttttygygttagttgattggyggttygagyggtttyggagyggyggaggtttggyggagygttggagyggagtgggayggttagtttgggtttattttygtattttgtaggtttyggtttaygtaygttygtttggagtgygygttttatttttaggttaaattatygttttttttttttygygtattttttttttttagttttttttgtattttatttttatttygtgttatttttaaggaggtttagaatgagygtygggataaygttttttgggttttttgtttttaagyggttttygtttagtgggygaygttttgtgtgttttygyggtttttggtygtgtgtgtygtgygtttttgtttttggagatttgygygtatttgtatgttggggagggygggttygaggtttygagagttgtgtttagatttaatttttaattttaggggattttttttaggttaagygagggttttttttggygggtgtagtygtagagttttgaggttygattttattggtttygtygtttttygygtttattttatygtataatgtttatagtgaaggygaygggaaaagtagtagtttaaaggttttgaatttttttttttygttataygtayggaattttgagttttyggagtttyggggtygaggtyggttygggayggtgtttygagtagttttttattgttggggagtyggttttgtttttgtttgaaygttttgtaaygattaagtagatttyggygttagttygtygyggagaggtttaaataggtataaagtgygattttaagtggttattgtgygtaaaggygtygygatygttyggtttayggtyggaaggtttggayggygtttygtatttagttaggttttttttatttggtttaatttaagttagtttagaaygtatattatgtgtgtattagagtttaggataggtttttttygagygatgtataggtt

SEQ ID NO: 12575 - DNA, 782 bp, synthetic construct
  misc_feature 1..782: note = Description of Artificial Sequence: Synthetic polynucleotide
  source 1..782: mol_type = other DNA
gcgttttcgagttacgtagaggcgttttttttcgtcggagacgggaaagtttcggcgtttttagattgggtttcgtttttagttttcggaggggttggggttttttcgcgtgcgtttcgtatttgtcgggggttcgtattcgttttcgtcggggttttagggggtacgacggtcgtggttcggcgtttttgggaggggagcgggatattttcgaaggcggcgcgttggaggcggggagcggtcggggcgtacggagagggcggggagttcgcgggagggggaggagggggaggagggggaggaggcgcgaggtgggggggagcgcggcgggcggtagggagggagcgggagggaggtaagaaagtagtagaaagtgaggttggtaggcggcggtaaaggagtcggcgcgcggcggcggtaggaagtttgtgttcgagaatagtagaaataagagttagggagggatcgcggtcgcggcggcggcggcgagagcgaaagaggaaattgtagaggaggaagttgcgtcgtagttcgagtcgttcggtattttcgtcgtttttgcgttcgcgtcgcgttttcggcgttttttttttagcgcgttttcggtcgttttttcgcgtcgcgttcgtcggttatggttcgggagaacggcgagagtagttttttttggaaaaagtaagttgaagatattaagaagattttcgagtttaaagagattttcggaacgtaagtggggatcggggaggcgagggtggaggtggtcgcggtaggggttgtacggg

SEQ ID NO: 12576 - DNA, 615 bp, synthetic construct
  misc_feature 1..615: note = Description of Artificial Sequence: Synthetic polynucleotide
  source 1..615: mol_type = other DNA
tcgtgattttttttattttttcgattttttaggttttttatagtgattttttatcgtgttttattttatgaatcgttagagttattcgtttttaaattttaaattttgcgtaatgtttttttatagatttttttaggtattacgtagtttcgagtttcgagtttcgtttcgggggttttatttcgttttttcgcgttcgcggttcgtttttttttattgagcgtttagttttcgtagttttttcggtcgtcgagcgtcgtgggcggggttttagggcggcggcgtttcgcggggagggtttttcgtgttgggggcgaggttattcgaggtagtttttcgttcgtttttaatttcgtttcgttttcggagtttataaagggaggcgattcgcggttcgttcggttggtattttttagtcgtcgttagtttcgtcgaggggagttagcgtcgtttttgaggggcgttcggcgtcggagttatgatttttcgtcgatttaggaagttgtagtagaaggaggaggcggcggttatttcggatttcgtcgttcggattttcgattcggaagtcgcgttcgtcgtttcggtttcgatttcgggattttttgtcgtagtcgt

SEQ ID NO: 12577 - DNA, 763 bp, synthetic construct
  misc_feature 1..763: note = Description of Artificial Sequence: Synthetic polynucleotide
  source 1..763: mol_type = other DNA
gggaacgagatattgttgagttggaagatttcgcgggttataggtatagtttttttgttgttggcggcgttgttggggttgtttggtaacggtttcgtggtgtggagtttggcgggttggcggtttgtacgggggcgatcgttggcggttacgtttgtgttgtatttggcgttggtcgacggcgcggtgttgttgtttacgtcgttttttgtggtttttttgattcggtaggtttggtcgttgggttaggcgggttgtaaggcggtgtattacgtgtgcgcgtttagtatgtacgttagcgtgttgtttatcggtttgtttagtttgtagcgttgtttcgtagttattcgtttttttttggcgtttcggttgcgtagttcggttttggttcgtcgtttgttgttggcggtttggttggtcgttttgttgttcgtcgtttcggtcgtcgtttatcgttatttgtggagggatcgcgtatgttagttgtgttattcgtcgtcggtttacgtcgtcgtttatttgagtttggagattttgatcgttttcgtgttttttttcgggttgatgttcggttgttatagcgtgacgttggtacggttgcggggcgttcgttggggtttcgggcggtacggggcgcgggtgggtcggttggtgagcgttatcgtgtttgttttcggtttgttttgggttttttattacgtagttaattttttgtaggcggtcgtagcgttggttttatcggaaggggttttggcgaagttgg

SEQ ID NO: 12578 - DNA, 1020 bp, synthetic construct
  misc_feature 1..1020: note = Description of Artificial Sequence: Synthetic polynucleotide
  source 1..1020: mol_type = other DNA
ttggggtagttttttttttgtttatttattgtttagtttttttttttatattttttttcggaaacgtttgtttttgataaggtttattttttgtttttaggaggtttttattgtggaggaagggaggcgtcgttcgtttttggtttttttgatagtcgtgttttattttcgttttgtgttttttttttcggatagtgttttttttagggtttatttaggagggtgtagcggtggttttcggggcggtggtcgtggtgggggtgttagttgtaggggtgttttcggtgggtgggagttggtggtttttcgttggtgttatgggattcgtatgttcgttttgcgtttttcggtttttgagtttataggtcgggattttgtttgttagtcgcgtgcgttgtcgtttaatttttgtaggcgtagagcgcgcggcggcggtgatagagaattttgtttggttgtttaaatatagttttttgtagaaggattttgcgttcggggaaggggaggaatttttttttttttgggcgttcgtttttttcgttatggttcggtttttatattcgtttatatttggtcgtagcggggcgttcggggggaggggttgaggtcgcgtttttcgtcgttttttgggcgcgggttaggcggggaggaggggggcgtttcggtcgtgtgtttaggattgttttttagcggttattcgggttttagttttttaggtttggttttgataggcgggcggagtagttagtgcgagatagggaggtcggtgcgggtgcgggaatttgattcgttcgggaggcgggggcggggcgggggcgtagcgcgcggggaggggtcggcgttcgttttttttttttatttatttagttgagttagggggtttaggggttttttcggcggttagttttgtattgtaggagcgcgggcgcggcgttttagttagcgcgtagggttcgggtttcgtcgggggcgttttttcgtcgttgtttttcgcgcgattcgttgtttattagttattat

SEQ ID NO: 12579 - DNA, 608 bp, synthetic construct
  misc_feature 1..608: note = Description of Artificial Sequence: Synthetic polynucleotide
  source 1..608: mol_type = other DNA
gcgggttttatttttttttttgttaggggtagattttgggattatttagttcgttttcgtaggttttgagcgtttgacgtttgcgtattgagcgcgggcgggcgggtatttttagaaattttcggggcgttgtaggcgggataagtaggttttataggtcgagtttacgagtttttcgaggggtgagcggttcgggttttttggcgttttggtcggttagttaagcgttggattatattttttagaggtacggcgttcggagcgttggattatattttttagaggtatcgttttcggagcgtagttttattttcgttagtttgcgagatttggaggtttcgcgtggggagagggtcgcgtttgtggaggagtttggtttcgtatttgttgggttggcgaattcgaaattgggtttggaattcgggagttagattttggattttgaattgtatttttgttaaggtaggagtgttcgggatgtcggagcggatacgcgcggagaaagcgtcgttggggttattcgtgtggtcgtgttttcggttttgtgtgtaggttatagtttgtttggtattggcgattgtttgtgtatatacgattggacgtgtgtg

SEQ ID NO: 12580 - DNA, 1539 bp, synthetic construct
  misc_feature 1..1539: note = Description of Artificial Sequence: Synthetic polynucleotide
  source 1..1539: mol_type = other DNA
tttggttttatgtttagtttcgcggttatcgttgaagcgaggcgtagtcgtcgttgtcgttcgggaaattttgcggtcggtcggagcgcgtcgagttaagcgcgggggggaagagcggagaagagttggggaggcggggagcgagggcgtagcgggtcggggtcgtcggttaagtttttgtttggggacgcggcggcgcgtcggagagtttcgaggttgtttgtatcgttttagagttttgggttgtgttcgcgtagggatcgggtcgggtagagtcgggcggggtggagaggtaagcggagcgcgcggtggggttgaggggaggcgtggggcgagtgttcgttgttcgttttttagtttttttgtttttacgttttttcgttcgtagtcgttcgtagttcggcggtgtagttgtgttggattcggcggcgtcgtagttttttatcgttttttgatgttattggggtgcgggggttcgggcggttcggtgcgcgggttaatagttgtacggttttcgcggtttagcggcgtagggcggggcgcgtttgatagttttttcgtttttcgcgttagttgattggcggttcgagcggtttcggagcggcggaggtttggcggagcgttggagcggagtgggacggttagtttgggtttattttcgtattttgtaggtttcggtttacgtacgttcgtttggagtgcgcgttttatttttaggttaaattatcgttttttttttttcgcgtattttttttttttagttttttttgtattttatttttatttcgtgttatttttaaggaggtttagaatgagcgtcgggataacgttttttgggttttttgtttttaagcggttttcgtttagtgggcgacgttttgtgtgttttcgcggtttttggtcgtgtgtgtcgtgcgtttttgtttttggagatttgcgcgtatttgtatgttggggagggcgggttcgaggtttcgagagttgtgtttagatttaatttttaattttaggggattttttttaggttaagcgagggttttttttggcgggtgtagtcgtagagttttgaggttcgattttattggtttcgtcgtttttcgcgtttattttatcgtataatgtttatagtgaaggcgacgggaaaagtagtagtttaaaggttttgaatttttttttttcgttatacgtacggaattttgagttttcggagtttcggggtcgaggtcggttcgggacggtgtttcgagtagttttttattgttggggagtcggttttgtttttgtttgaacgttttgtaacgattaagtagatttcggcgttagttcgtcgcggagaggtttaaataggtataaagtgcgattttaagtggttattgtgcgtaaaggcgtcgcgatcgttcggtttacggtcggaaggtttggacggcgtttcgtatttagttaggttttttttatttggtttaatttaagttagtttagaacgtatattatgtgtgtattagagtttaggataggtttttttcgagcgatgtataggtt

SEQ ID NO: 12581 - DNA, 782 bp, Homo sapiens
  source 1..782: mol_type = unassigned DNA
cccgtgcagcccctgccgcggccacctccaccctcgcctccccggtccccacttacgttccgagggtctctttgaactcgaagatcttcttgatgtcttcagcttgctttttccaggaggagctgctctcgccgttctcccgggccatggccgacgagcgcggcgcggaggagcggccgggggcgcgctggggagggggcgccgggggcgcggcgcgggcgcagaggcggcggggatgccgggcggctcgggctgcggcgcagcttcctcctctgcagtttcctctttcgctctcgccgccgccgccgcggccgcggtccctccctggctcttatttctgctgttctcgggcacagacttcctgccgccgccgcgcgccggctcctttgccgccgcctgccagcctcactttctgctactttcttgcctccctcccgctccctccctgccgcccgccgcgctcccccccacctcgcgcctcctccccctcctccccctcctccccctcccgcgggctccccgccctctccgtgcgccccggccgctccccgcctccagcgcgccgccttcggggatgtcccgctcccctcccaagagcgccgggccacggccgtcgtgccccctggagccccggcgagggcgggtacgggcccccggcaggtgcggggcgcacgcgggagagccccagcccctccgggagctggaaacggagcccagtctgggggcgccggggctttcccgtctccggcgggagggggcgcctctgcgtggctcggaagcgc

SEQ ID NO: 12582 - DNA, 615 bp, Homo sapiens
  source 1..615: mol_type = unassigned DNA
gcggctgcggcagggggtcccggggtcgggaccggagcggcgggcgcgacttccgagtcgggagtccgggcggcggggtccggggtggccgccgcctcctccttctgctgcagcttcctgagtcggcggagggtcatggctccggcgccggacgcccctcagagacggcgctggctcccctcggcggggctggcggcggctgggggatgccagccgggcgggccgcgggtcgcctccctttataggctccgagagcggggcggggttgggggcgggcggggagctgcctcgggtggcctcgcccccagcacggaggaccctccccgcgaggcgccgccgccctggagccccgcccacggcgctcgacggccggggaaactgcgggagctgggcgctcagtgggggaaaacgagccgcggacgcgaaggggcgggatgaggcccccggggcggggctcggggctcggggctgcgtgatacctggaggggtctgtgaagggacattgcgcaaggtttgaaatttagggacgaatagctctggcgattcatggagtggggcacggtaagaggtcactgtaagaagcctggggagtcggggaggtagggagagtcacgg

SEQ ID NO: 12583 - DNA, 763 bp, Homo sapiens
  source 1..763: mol_type = unassigned DNA
ccagcttcgccaaggccccttccggtggagccagcgctgcgaccgcctgcagaaggttgactgcgtggtagggggcccagagcaagccgaaggcaagcacgatggcgctcaccagccggcccacccgcgccccgtgccgcccggagccccagcgggcgccccgcagccgtgccagcgtcacgctgtagcagccgagcatcagcccgaaaggaagcacgaaagcggtcagagtctccaggctcaggtgggcggcggcgtggaccggcgacgggtggcacagctggcatacgcggtccctccacaggtggcggtagacggcggccgggacggcgagcaacagggcggccagccagaccgccagcagcaggcggcgggccagggccgggctgcgcagccgaggcgccaggaaggggcgggtgactgcgaggcagcgctgcaggctgagcaggccggtgagcagcacgctggcgtacatgctgagcgcgcacacgtagtacaccgccttgcagcccgcctggcccagcggccaggcctgccgggtcaggaaggccacaaagagcggcgtgagcagcagcaccgcgccgtcggccagcgccaggtgcagcacaagcgtggccgccagcggtcgcccccgtgcaggccgccagcccgccaagctccacaccacgaagccgttgccaggcagccccagcagcgccgccagcagcaggaaggctgtgcctgtggcccgcgaagtcttccagctcagcagtgtctcgttccc

SEQ ID NO: 12584 - DNA, 1020 bp, Homo sapiens
  source 1..1020: mol_type = unassigned DNA
atgatggctggtgggcagcgggtcgcgcggagggcagcggcgaggaagcgcccccggcggggcccgggccctgcgcgctggctggggcgccgcgcccgcgctcctgcagtgcagagctagccgccggaggagcccctaggccccctggctcagctgaatgaatgggggaggaaggcgggcgccggcccctccccgcgcgctgcgcccccgccccgcccccgcctcccgggcggatcaggttcccgcacccgcaccggcctccctgtctcgcactggctgctccgcccgcctgtcaaggccaggcctggggggctggggcccgagtggccgctgggggacagtcctgggcacacgaccggagcgcccccctcctccccgcctggcccgcgcccaggggacggcgagagacgcggcctcagcccctccccccgggcgccccgctgcggccagatgtgggcggatgtggaggccgggccatggcgaggagggcgggcgcccagaggggaagagattcctccccttccccgggcgcagggtccttctgcaggaggctgtatttgggcagccaaacaaagttctctgtcaccgccgccgcgcgctctgcgcctgcaagggttaaacggcagcgcacgcggctggcaggcaggatcccggcctgtgggctcaagagccgaggggcgcagggcgaacatgcgagtcccatggcaccagcgagaggccaccaactcccacccaccgagggcacccctgcagctaacacccccaccacgaccaccgccccgggggccaccgctgcaccctcctgggtgagccctggagaaggcactgtccgggagaaggggcacagggcggggatggaacacggctgtcagagaagccagggacgggcgacgcctcccttcctccacaataagggcctcctgagagcaggaagtagaccttgtcaggagcagacgtttccgaaggaaggtgtgaaggaaggagctaggcagtgagtgagcagaaagggagctgccccaa

SEQ ID NO: 12585 - DNA, 608 bp, Homo sapiens
  source 1..608: mol_type = unassigned DNA
cacacacgtccagtcgtgtatgcacaggcagtcgccaataccaggcaggctgtagcctgcacacaaaaccggagacacggccacacgagtaaccccagcgacgctttctccgcgcgtgtccgctccggcatcccggacactcctaccttgacagaggtgcagttcagggtccaagatctggctcccgggttccaagcccaatttcgggttcgccagcccagcaggtgcggagccaagctcctccacagacgcggccctctccccacgcgaggcctccaaatctcgcaaactaacggaaatgaagctacgctccgggagcggtgcctctgggaaatgtagtccagcgctccggacgccgtgcctctgggaaatgtagtccagcgcttggctagccggccagaacgccaggaggcccgggccgctcacccctcgaggggctcgtgggctcggcctgtggaacctgcttgtcccgcctgcagcgccccggaggtttctgggagtgcccgcccgcccgcgctcagtgcgcaggcgtcagacgctcagggcctgcgagagcgagctgagtggtcccagggtctacccctggcaggagagagggtgggacccgc

SEQ ID NO: 12586 - DNA, 1539 bp, Homo sapiens
  source 1..1539: mol_type = unassigned DNA
gacctgtacatcgctcgaggggaacctgtcctgggctctggtgcacacatagtatgcgttctgggctggcttgggttgggccaggtaggggagacctggctgggtacgaggcgccgtccaagccttccggccgtgggccgggcggtcgcggcgcctttgcgcacagtggccacttggggtcgcactttatgcctgtttgagcctctccgcggcgggctgacgccgggatctgcttaatcgttacaaaacgttcaaacaaaaacagggccggctccccagcagtggagagctactcggagcaccgtcccgggccggcctcggccccgaggctccgggggctcaggattccgtgcgtgtggcggggaagaggaattcagagcctttgggctgctgcttttcccgtcgccttcactgtgaacattgtgcggtggggtgaacgcggggagcggcggggccagtggagtcgaacctcagggctctgcgactgcacccgccaggaggggccctcgcttggcctgagaaaggtcccctgaggttaagagttgggtctgaacacaactctcggagcctcgagcccgccctccccaacatacaaatacgcgcagatctccagaaacaggaacgcacgacacacacggccagaagccgcgaggacacacagagcgtcgcccactgggcgggggccgcttgggaacaaagggcccaggaggcgttgtcccggcgctcattctgagcctccttgggggtgacacgggatgggggtggggtgcaaagggaactgagggaggagagtgcgcgaggaggggaaagcggtgatttggcctagaggtggggcgcgcactccaggcgagcgtgcgtgggccgggacctgcagggtacgggggtgggcccaggctggccgtcccactccgctccagcgctccgccaggcctccgccgctccggggccgctcgggccgccagtcagctgacgcggggggcgggggagctgtcaggcgcgccccgccctgcgccgctgggccgcggaggccgtgcagctattggcccgcgcaccgggccgcccgggcccccgcaccccagtgacatcaggaggcgataaaaggctgcggcgccgccggatccagcacagctgcaccgccgagctgcgagcggctgcgagcgagagagcgtaagagcaagagagctagagagcgagcaacgggcactcgccccacgcctcccctcagccccaccgcgcgctccgcttgcctctccaccccgcccgactctacccggcccggtccctgcgcgggcacagcccagagctctggggcggtgcaggcagcctcgggactctccggcgcgccgccgcgtccccagacaaaggcttggccggcggccccggcccgctgcgccctcgctccccgcctccccagctcttctccgctcttcccccccgcgcttggctcggcgcgctccggccggccgcaaagtttcccgggcggcagcggcggctgcgcctcgcttcagcgatggccgcggagctgagcatggggccaga

SEQ ID NO: 12587 - DNA, 782 bp, synthetic construct
  misc_feature 1..782: note = Description of Artificial Sequence: Synthetic polynucleotide
  source 1..782: mol_type = other DNA
ttygtgtagtttttgtygyggttatttttattttygttttttyggtttttatttaygtttygagggtttttttgaattygaagatttttttgatgtttttagtttgttttttttaggaggagttgttttygtygttttttygggttatggtygaygagygyggygyggaggagyggtygggggygygttggggagggggygtygggggygyggygygggygtagaggyggyggggatgtygggyggttygggttgyggygtagtttttttttttgtagttttttttttygttttygtygtygtygtygyggtygyggtttttttttggtttttatttttgttgttttygggtatagattttttgtygtygtygygygtyggtttttttgtygtygtttgttagttttattttttgttatttttttgtttttttttygttttttttttgtygttygtygygtttttttttatttygygttttttttttttttttttttttttttttttttygygggtttttygtttttttygtgygtttyggtygtttttygtttttagygygtygttttyggggatgtttygttttttttttaagagygtygggttayggtygtygtgttttttggagtttyggygagggygggtaygggttttyggtaggtgyggggygtaygygggagagttttagttttttygggagttggaaayggagtttagtttgggggygtyggggttttttygttttyggygggagggggygtttttgygtggttyggaagygt

SEQ ID NO: 12588 - DNA, 615 bp, synthetic construct
  misc_feature 1..615: note = Description of Artificial Sequence: Synthetic polynucleotide
  source 1..615: mol_type = other DNA
gyggttgyggtagggggtttyggggtygggatyggagyggygggygygattttygagtygggagttygggyggyggggttyggggtggtygtygttttttttttttgttgtagttttttgagtyggyggagggttatggtttyggygtyggaygttttttagagayggygttggtttttttyggyggggttggyggyggttgggggatgttagtygggygggtygygggtygtttttttttataggtttygagagyggggyggggttgggggygggyggggagttgtttygggtggtttygtttttagtayggaggatttttttygygaggygtygtygttttggagtttygtttayggygttygayggtyggggaaattgygggagttgggygtttagtgggggaaaaygagtygyggaygygaaggggygggatgaggttttyggggyggggttyggggttyggggttgygtgatatttggaggggtttgtgaagggatattgygtaaggtttgaaatttagggaygaatagttttggygatttatggagtggggtayggtaagaggttattgtaagaagtttggggagtyggggaggtagggagagttaygg

SEQ ID NO: 12589 - DNA, 763 bp, synthetic construct
  misc_feature 1..763: note = Description of Artificial Sequence: Synthetic polynucleotide
  source 1..763: mol_type = other DNA
ttagtttygttaaggtttttttyggtggagttagygttgygatygtttgtagaaggttgattgygtggtagggggtttagagtaagtygaaggtaagtaygatggygtttattagtyggtttattygygtttygtgtygttyggagttttagygggygtttygtagtygtgttagygttaygttgtagtagtygagtattagttygaaaggaagtaygaaagyggttagagtttttaggtttaggtgggyggyggygtggatyggygaygggtggtatagttggtataygyggtttttttataggtggyggtagayggyggtygggayggygagtaatagggyggttagttagatygttagtagtaggyggygggttagggtygggttgygtagtygaggygttaggaaggggygggtgattgygaggtagygttgtaggttgagtaggtyggtgagtagtaygttggygtatatgttgagygygtataygtagtatatygttttgtagttygtttggtttagyggttaggtttgtygggttaggaaggttataaagagyggygtgagtagtagtatygygtygtyggttagygttaggtgtagtataagygtggtygttagyggtygttttygtgtaggtygttagttygttaagttttatattaygaagtygttgttaggtagttttagtagygtygttagtagtaggaaggttgtgtttgtggttygygaagttttttagtttagtagtgtttygttttt

SEQ ID NO: 12590 - DNA, 1020 bp, synthetic construct
  misc_feature 1..1020: note = Description of Artificial Sequence: Synthetic polynucleotide
  source 1..1020: mol_type = other DNA
atgatggttggtgggtagygggtygygyggagggtagyggygaggaagygttttyggyggggttygggttttgygygttggttggggygtygygttygygtttttgtagtgtagagttagtygtyggaggagtttttaggttttttggtttagttgaatgaatgggggaggaaggygggygtyggttttttttygygygttgygttttygtttygttttygtttttygggyggattaggttttygtattygtatyggtttttttgtttygtattggttgtttygttygtttgttaaggttaggtttggggggttggggttygagtggtygttgggggatagttttgggtataygatyggagygtttttttttttttygtttggttygygtttaggggayggygagagaygyggttttagttttttttttygggygtttygttgyggttagatgtgggyggatgtggaggtygggttatggygaggagggygggygtttagaggggaagagattttttttttttttygggygtagggtttttttgtaggaggttgtatttgggtagttaaataaagttttttgttatygtygtygygygttttgygtttgtaagggttaaayggtagygtaygyggttggtaggtaggatttyggtttgtgggtttaagagtygaggggygtagggygaatatgygagttttatggtattagygagaggttattaatttttatttatygagggtatttttgtagttaatatttttattaygattatygtttygggggttatygttgtatttttttgggtgagttttggagaaggtattgttygggagaaggggtatagggyggggatggaatayggttgttagagaagttagggaygggygaygtttttttttttttataataagggttttttgagagtaggaagtagattttgttaggagtagaygttttygaaggaaggtgtgaaggaaggagttaggtagtgagtgagtagaaagggagttgttttaa

SEQ ID NO: 12591 - DNA, 608 bp, synthetic construct
  misc_feature 1..608: note = Description of Artificial Sequence: Synthetic polynucleotide
  source 1..608: mol_type = other DNA
tatataygtttagtygtgtatgtataggtagtygttaatattaggtaggttgtagtttgtatataaaatyggagatayggttataygagtaattttagygaygtttttttygygygtgttygtttyggtatttyggatatttttattttgatagaggtgtagtttagggtttaagatttggttttygggttttaagtttaatttygggttygttagtttagtaggtgyggagttaagtttttttatagaygyggttttttttttaygygaggtttttaaatttygtaaattaayggaaatgaagttaygtttygggagyggtgtttttgggaaatgtagtttagygtttyggaygtygtgtttttgggaaatgtagtttagygtttggttagtyggttagaaygttaggaggttygggtygtttatttttygaggggttygtgggttyggtttgtggaatttgtttgtttygtttgtagygtttyggaggtttttgggagtgttygttygttygygtttagtgygtaggygttagaygtttagggtttgygagagygagttgagtggttttagggtttatttttggtaggagagagggtgggattygt

SEQ ID NO: 12592 - DNA, 1539 bp, synthetic construct
  misc_feature 1..1539: note = Description of Artificial Sequence: Synthetic polynucleotide
  source 1..1539: mol_type = other DNA
gatttgtatatygttygaggggaatttgttttgggttttggtgtatatatagtatgygttttgggttggtttgggttgggttaggtaggggagatttggttgggtaygaggygtygtttaagtttttyggtygtgggtygggyggtygyggygtttttgygtatagtggttatttggggtygtattttatgtttgtttgagttttttygyggygggttgaygtygggatttgtttaatygttataaaaygtttaaataaaaatagggtyggttttttagtagtggagagttattyggagtatygtttygggtyggtttyggtttygaggtttygggggtttaggatttygtgygtgtggyggggaagaggaatttagagtttttgggttgttgtttttttygtygtttttattgtgaatattgtgyggtggggtgaaygyggggagyggyggggttagtggagtygaattttagggttttgygattgtattygttaggaggggttttygtttggtttgagaaaggttttttgaggttaagagttgggtttgaatataattttyggagtttygagttygttttttttaatatataaataygygtagatttttagaaataggaaygtaygatatatayggttagaagtygygaggatatatagagygtygtttattgggygggggtygtttgggaataaagggtttaggaggygttgtttyggygtttattttgagtttttttgggggtgataygggatgggggtggggtgtaaagggaattgagggaggagagtgygygaggaggggaaagyggtgatttggtttagaggtggggygygtattttaggygagygtgygtgggtygggatttgtagggtaygggggtgggtttaggttggtygttttatttygttttagygtttygttaggttttygtygtttyggggtygttygggtygttagttagttgaygyggggggygggggagttgttaggygygtttygttttgygtygttgggtygyggaggtygtgtagttattggttygygtatygggtygttygggttttygtattttagtgatattaggaggygataaaaggttgyggygtygtyggatttagtatagttgtatygtygagttgygagyggttgygagygagagagygtaagagtaagagagttagagagygagtaaygggtattygttttaygtttttttttagttttatygygygtttygtttgtttttttatttygttygattttattyggttyggtttttgygygggtatagtttagagttttggggyggtgtaggtagtttygggatttttyggygygtygtygygtttttagataaaggtttggtyggyggtttyggttygttgygttttygtttttygtttttttagttttttttygtttttttttttygygtttggttyggygygtttyggtyggtygtaaagtttttygggyggtagyggyggttgygtttygttttagygatggtygyggagttgagtatggggttaga

SEQ ID NO: 12593 - DNA, 782 bp, synthetic construct
  misc_feature 1..782: note = Description of Artificial Sequence: Synthetic polynucleotide
  source 1..782: mol_type = other DNA
ttcgtgtagtttttgtcgcggttatttttattttcgttttttcggtttttatttacgtttcgagggtttttttgaattcgaagatttttttgatgtttttagtttgttttttttaggaggagttgttttcgtcgttttttcgggttatggtcgacgagcgcggcgcggaggagcggtcgggggcgcgttggggagggggcgtcgggggcgcggcgcgggcgtagaggcggcggggatgtcgggcggttcgggttgcggcgtagtttttttttttgtagttttttttttcgttttcgtcgtcgtcgtcgcggtcgcggtttttttttggtttttatttttgttgttttcgggtatagattttttgtcgtcgtcgcgcgtcggtttttttgtcgtcgtttgttagttttattttttgttatttttttgtttttttttcgttttttttttgtcgttcgtcgcgtttttttttatttcgcgttttttttttttttttttttttttttttttttcgcgggtttttcgtttttttcgtgcgtttcggtcgtttttcgtttttagcgcgtcgttttcggggatgtttcgttttttttttaagagcgtcgggttacggtcgtcgtgttttttggagtttcggcgagggcgggtacgggttttcggtaggtgcggggcgtacgcgggagagttttagttttttcgggagttggaaacggagtttagtttgggggcgtcggggttttttcgttttcggcgggagggggcgtttttgcgtggttcggaagcgt

SEQ ID NO: 12594 - DNA, 615 bp, synthetic construct
  misc_feature 1..615: note = Description of Artificial Sequence: Synthetic polynucleotide
  source 1..615: mol_type = other DNA
gcggttgcggtagggggtttcggggtcgggatcggagcggcgggcgcgattttcgagtcgggagttcgggcggcggggttcggggtggtcgtcgttttttttttttgttgtagttttttgagtcggcggagggttatggtttcggcgtcggacgttttttagagacggcgttggtttttttcggcggggttggcggcggttgggggatgttagtcgggcgggtcgcgggtcgtttttttttataggtttcgagagcggggcggggttgggggcgggcggggagttgtttcgggtggtttcgtttttagtacggaggatttttttcgcgaggcgtcgtcgttttggagtttcgtttacggcgttcgacggtcggggaaattgcgggagttgggcgtttagtgggggaaaacgagtcgcggacgcgaaggggcgggatgaggttttcggggcggggttcggggttcggggttgcgtgatatttggaggggtttgtgaagggatattgcgtaaggtttgaaatttagggacgaatagttttggcgatttatggagtggggtacggtaagaggttattgtaagaagtttggggagtcggggaggtagggagagttacgg

SEQ ID NO: 12595 - DNA, 763 bp, synthetic construct
  misc_feature 1..763: note = Description of Artificial Sequence: Synthetic polynucleotide
  source 1..763: mol_type = other DNA
ttagtttcgttaaggtttttttcggtggagttagcgttgcgatcgtttgtagaaggttgattgcgtggtagggggtttagagtaagtcgaaggtaagtacgatggcgtttattagtcggtttattcgcgtttcgtgtcgttcggagttttagcgggcgtttcgtagtcgtgttagcgttacgttgtagtagtcgagtattagttcgaaaggaagtacgaaagcggttagagtttttaggtttaggtgggcggcggcgtggatcggcgacgggtggtatagttggtatacgcggtttttttataggtggcggtagacggcggtcgggacggcgagtaatagggcggttagttagatcgttagtagtaggcggcgggttagggtcgggttgcgtagtcgaggcgttaggaaggggcgggtgattgcgaggtagcgttgtaggttgagtaggtcggtgagtagtacgttggcgtatatgttgagcgcgtatacgtagtatatcgttttgtagttcgtttggtttagcggttaggtttgtcgggttaggaaggttataaagagcggcgtgagtagtagtatcgcgtcgtcggttagcgttaggtgtagtataagcgtggtcgttagcggtcgttttcgtgtaggtcgttagttcgttaagttttatattacgaagtcgttgttaggtagttttagtagcgtcgttagtagtaggaaggttgtgtttgtggttcgcgaagttttttagtttagtagtgtttcgttttt

SEQ ID NO: 12596 - DNA, 1020 bp, synthetic construct
  misc_feature 1..1020: note = Description of Artificial Sequence: Synthetic polynucleotide
  source 1..1020: mol_type = other DNA
atgatggttggtgggtagcgggtcgcgcggagggtagcggcgaggaagcgttttcggcggggttcgggttttgcgcgttggttggggcgtcgcgttcgcgtttttgtagtgtagagttagtcgtcggaggagtttttaggttttttggtttagttgaatgaatgggggaggaaggcgggcgtcggttttttttcgcgcgttgcgttttcgtttcgttttcgtttttcgggcggattaggttttcgtattcgtatcggtttttttgtttcgtattggttgtttcgttcgtttgttaaggttaggtttggggggttggggttcgagtggtcgttgggggatagttttgggtatacgatcggagcgtttttttttttttcgtttggttcgcgtttaggggacggcgagagacgcggttttagttttttttttcgggcgtttcgttgcggttagatgtgggcggatgtggaggtcgggttatggcgaggagggcgggcgtttagaggggaagagattttttttttttttcgggcgtagggtttttttgtaggaggttgtatttgggtagttaaataaagttttttgttatcgtcgtcgcgcgttttgcgtttgtaagggttaaacggtagcgtacgcggttggtaggtaggatttcggtttgtgggtttaagagtcgaggggcgtagggcgaatatgcgagttttatggtattagcgagaggttattaatttttatttatcgagggtatttttgtagttaatatttttattacgattatcgtttcgggggttatcgttgtatttttttgggtgagttttggagaaggtattgttcgggagaaggggtatagggcggggatggaatacggttgttagagaagttagggacgggcgacgtttttttttttttataataagggttttttgagagtaggaagtagattttgttaggagtagacgttttcgaaggaaggtgtgaaggaaggagttaggtagtgagtgagtagaaagggagttgttttaa

SEQ ID NO: 12597 - DNA, 608 bp, synthetic construct
  misc_feature 1..608: note = Description of Artificial Sequence: Synthetic polynucleotide
  source 1..608: mol_type = other DNA
tatatacgtttagtcgtgtatgtataggtagtcgttaatattaggtaggttgtagtttgtatataaaatcggagatacggttatacgagtaattttagcgacgtttttttcgcgcgtgttcgtttcggtatttcggatatttttattttgatagaggtgtagtttagggtttaagatttggttttcgggttttaagtttaatttcgggttcgttagtttagtaggtgcggagttaagtttttttatagacgcggttttttttttacgcgaggtttttaaatttcgtaaattaacggaaatgaagttacgtttcgggagcggtgtttttgggaaatgtagtttagcgtttcggacgtcgtgtttttgggaaatgtagtttagcgtttggttagtcggttagaacgttaggaggttcgggtcgtttatttttcgaggggttcgtgggttcggtttgtggaatttgtttgtttcgtttgtagcgtttcggaggtttttgggagtgttcgttcgttcgcgtttagtgcgtaggcgttagacgtttagggtttgcgagagcgagttgagtggttttagggtttatttttggtaggagagagggtgggattcgt

SEQ ID NO: 12598 - DNA, 1539 bp, synthetic construct
  misc_feature 1..1539: note = Description of Artificial Sequence: Synthetic polynucleotide
  source 1..1539: mol_type = other DNA
gatttgtatatcgttcgaggggaatttgttttgggttttggtgtatatatagtatgcgttttgggttggtttgggttgggttaggtaggggagatttggttgggtacgaggcgtcgtttaagtttttcggtcgtgggtcgggcggtcgcggcgtttttgcgtatagtggttatttggggtcgtattttatgtttgtttgagttttttcgcggcgggttgacgtcgggatttgtttaatcgttataaaacgtttaaataaaaatagggtcggttttttagtagtggagagttattcggagtatcgtttcgggtcggtttcggtttcgaggtttcgggggtttaggatttcgtgcgtgtggcggggaagaggaatttagagtttttgggttgttgtttttttcgtcgtttttattgtgaatattgtgcggtggggtgaacgcggggagcggcggggttagtggagtcgaattttagggttttgcgattgtattcgttaggaggggttttcgtttggtttgagaaaggttttttgaggttaagagttgggtttgaatataattttcggagtttcgagttcgttttttttaatatataaatacgcgtagatttttagaaataggaacgtacgatatatacggttagaagtcgcgaggatatatagagcgtcgtttattgggcgggggtcgtttgggaataaagggtttaggaggcgttgtttcggcgtttattttgagtttttttgggggtgatacgggatgggggtggggtgtaaagggaattgagggaggagagtgcgcgaggaggggaaagcggtgatttggtttagaggtggggcgcgtattttaggcgagcgtgcgtgggtcgggatttgtagggtacgggggtgggtttaggttggtcgttttatttcgttttagcgtttcgttaggttttcgtcgtttcggggtcgttcgggtcgttagttagttgacgcggggggcgggggagttgttaggcgcgtttcgttttgcgtcgttgggtcgcggaggtcgtgtagttattggttcgcgtatcgggtcgttcgggttttcgtattttagtgatattaggaggcgataaaaggttgcggcgtcgtcggatttagtatagttgtatcgtcgagttgcgagcggttgcgagcgagagagcgtaagagtaagagagttagagagcgagtaacgggtattcgttttacgtttttttttagttttatcgcgcgtttcgtttgtttttttatttcgttcgattttattcggttcggtttttgcgcgggtatagtttagagttttggggcggtgtaggtagtttcgggatttttcggcgcgtcgtcgcgtttttagataaaggtttggtcggcggtttcggttcgttgcgttttcgtttttcgtttttttagttttttttcgtttttttttttcgcgtttggttcggcgcgtttcggtcggtcgtaaagtttttcgggcggtagcggcggttgcgtttcgttttagcgatggtcgcggagttgagtatggggttaga

SEQ ID NO: 12599 - DNA, 262 bp, Homo sapiens
  source 1..262: mol_type = unassigned DNA
gaacagcagaaataagagccagggagggaccgcggccgcggcggcggcggcgagagcgaaagaggaaactgcagaggaggaagctgcgccgcagcccgagccgcccggcatccccgccgcctctgcgcccgcgccgcgcccccggcgccccctccccagcgcgcccccggccgctcctccgcgccgcgctcgtcggccatggcccgggagaacggcgagagcagctcctcctggaaaaagcaagctgaagacatcaagaaga

SEQ ID NO: 12600 - DNA, 288 bp, Homo sapiens
  source 1..288: mol_type = unassigned DNA
aaaccttgcgcaatgtcccttcacagacccctccaggtatcacgcagccccgagccccgagccccgccccgggggcctcatcccgccccttcgcgtccgcggctcgttttcccccactgagcgcccagctcccgcagtttccccggccgtcgagcgccgtgggcggggctccagggcggcggcgcctcgcggggagggtcctccgtgctgggggcgaggccacccgaggcagctccccgcccgcccccaaccccgccccgctctcggagcctataaagggaggcgacc

SEQ ID NO: 12601 - DNA, 235 bp, Homo sapiens
  source 1..235: mol_type = unassigned DNA
gctcaccggcctgctcagcctgcagcgctgcctcgcagtcacccgccccttcctggcgcctcggctgcgcagcccggccctggcccgccgcctgctgctggcggtctggctggccgccctgttgctcgccgtcccggccgccgtctaccgccacctgtggagggaccgcgtatgccagctgtgccacccgtcgccggtccacgccgccgcccacctgagcctggagactctgacc

SEQ ID NO: 12602 - DNA, 273 bp, Homo sapiens
  source 1..273: mol_type = unassigned DNA
ctccagggctcacccaggagggtgcagcggtggcccccggggcggtggtcgtggtgggggtgttagctgcaggggtgccctcggtgggtgggagttggtggcctctcgctggtgccatgggactcgcatgttcgccctgcgcccctcggctcttgagcccacaggccgggatcctgcctgccagccgcgtgcgctgccgtttaacccttgcaggcgcagagcgcgcggcggcggtgacagagaactttgtttggctgcccaaatacagcctcc

SEQ ID NO: 12603 - DNA, 257 bp, Homo sapiens
  source 1..257: mol_type = unassigned DNA
gctgcaggcgggacaagcaggttccacaggccgagcccacgagcccctcgaggggtgagcggcccgggcctcctggcgttctggccggctagccaagcgctggactacatttcccagaggcacggcgtccggagcgctggactacatttcccagaggcaccgctcccggagcgtagcttcatttccgttagtttgcgagatttggaggcctcgcgtggggagagggccgcgtctgtggaggagcttggctccgcacc

SEQ ID NO: 12604 - DNA, 254 bp, Homo sapiens
  source 1..254: mol_type = unassigned DNA
cctgcaccgccccagagctctgggctgtgcccgcgcagggaccgggccgggtagagtcgggcggggtggagaggcaagcggagcgcgcggtggggctgaggggaggcgtggggcgagtgcccgttgctcgctctctagctctcttgctcttacgctctctcgctcgcagccgctcgcagctcggcggtgcagctgtgctggatccggcggcgccgcagccttttatcgcctcctgatgtcactggggtgcgggg

SEQ ID NO: 12605 - DNA, 262 bp, synthetic construct
  misc_feature 1..262: note = Description of Artificial Sequence: Synthetic polynucleotide
  source 1..262: mol_type = other DNA
gaacagcagaaataagagccagggagggacygyggtygyggyggyggyggygagagygaaagaggaaattgtagaggaggaagttgygtygtagttygagtygttyggtattttygtygtttttgygttygygtygygttttyggygttttttttttagygygttttyggtygttttttygygtygygttygtyggttatggttygggagaayggygagagtagttttttttggaaaaagtaagttgaagatattaagaaga

SEQ ID NO: 12606 - DNA, 288 bp, synthetic construct
  misc_feature 1..288: note = Description of Artificial Sequence: Synthetic polynucleotide
  source 1..288: mol_type = other DNA
aaattttgygtaatgtttttttatagatttttttaggtattaygtagtttygagtttygagtttygtttygggggttttatttygttttttygygttygyggttygtttttttttattgagygtttagttttygtagttttttyggtygtygagygtygtgggyggggttttagggyggyggygtttygyggggagggtttttygtgttgggggygaggttattygaggtagtttttygttygtttttaatttygtttygttttyggagtttataaagggaggygatt

SEQ ID NO: 12607 - DNA, 235 bp, synthetic construct
  misc_feature 1..235: note = Description of Artificial Sequence: Synthetic polynucleotide
  source 1..235: mol_type = other DNA
gtttatyggtttgtttagtttgtagygttgtttygtagttattygtttttttttggygtttyggttgygtagttyggttttggttygtygtttgttgttggyggtttggttggtygttttgttgttygtygtttyggtygtygtttatygttatttgtggagggatygygtatgttagttgtgttattygtygtyggtttaygtygtygtttatttgagtttggagattttgatt

SEQ ID NO: 12608 - DNA, 273 bp, synthetic construct
  misc_feature 1..273: note = Description of Artificial Sequence: Synthetic polynucleotide
  source 1..273: mol_type = other DNA
ttttagggtttatttaggagggtgtagyggtggttttyggggyggtggtygtggtgggggtgttagttgtaggggtgttttyggtgggtgggagttggtggtttttygttggtgttatgggattygtatgttygttttgygtttttyggtttttgagtttataggtygggattttgtttgttagtygygtgygttgtygtttaatttttgtaggygtagagygygyggyggyggtgatagagaattttgtttggttgtttaaatatagttttt

SEQ ID NO: 12609 - DNA, 257 bp, synthetic construct
  misc_feature 1..257: note = Description of Artificial Sequence: Synthetic polynucleotide
  source 1..257: mol_type = other DNA
gttgtaggygggataagtaggttttataggtygagtttaygagtttttygaggggtgagyggttygggttttttggygttttggtyggttagttaagygttggattatattttttagaggtayggygttyggagygttggattatattttttagaggtatygttttyggagygtagttttattttygttagtttgygagatttggaggtttygygtggggagagggtygygtttgtggaggagtttggtttygtatt

SEQ ID NO: 12610 - DNA, 254 bp, synthetic construct
  misc_feature 1..254: note = Description of Artificial Sequence: Synthetic polynucleotide
  source 1..254: mol_type = other DNA
tttgtatygttttagagttttgggttgtgttygygtagggatygggtygggtagagtygggyggggtggagaggtaagyggagygygyggtggggttgaggggaggygtggggygagtgttygttgttygttttttagtttttttgtttttaygttttttygttygtagtygttygtagttyggyggtgtagttgtgttggattyggyggygtygtagttttttatygttttttgatgttattggggtgygggg

SEQ ID NO: 12611 - DNA, 262 bp, synthetic construct
  misc_feature 1..262: note = Description of Artificial Sequence: Synthetic polynucleotide
  source 1..262: mol_type = other DNA
gaacagcagaaataagagccagggagggaccgcggtcgcggcggcggcggcgagagcgaaagaggaaattgtagaggaggaagttgcgtcgtagttcgagtcgttcggtattttcgtcgtttttgcgttcgcgtcgcgttttcggcgttttttttttagcgcgttttcggtcgttttttcgcgtcgcgttcgtcggttatggttcgggagaacggcgagagtagttttttttggaaaaagtaagttgaagatattaagaaga

SEQ ID NO: 12612 - DNA, 288 bp, synthetic construct
  misc_feature 1..288: note = Description of Artificial Sequence: Synthetic polynucleotide
  source 1..288: mol_type = other DNA
aaattttgcgtaatgtttttttatagatttttttaggtattacgtagtttcgagtttcgagtttcgtttcgggggttttatttcgttttttcgcgttcgcggttcgtttttttttattgagcgtttagttttcgtagttttttcggtcgtcgagcgtcgtgggcggggttttagggcggcggcgtttcgcggggagggtttttcgtgttgggggcgaggttattcgaggtagtttttcgttcgtttttaatttcgtttcgttttcggagtttataaagggaggcgatt

SEQ ID NO: 12613 - DNA, 235 bp, synthetic construct
  misc_feature 1..235: note = Description of Artificial Sequence: Synthetic polynucleotide
  source 1..235: mol_type = other DNA
gtttatcggtttgtttagtttgtagcgttgtttcgtagttattcgtttttttttggcgtttcggttgcgtagttcggttttggttcgtcgtttgttgttggcggtttggttggtcgttttgttgttcgtcgtttcggtcgtcgtttatcgttatttgtggagggatcgcgtatgttagttgtgttattcgtcgtcggtttacgtcgtcgtttatttgagtttggagattttgatt

SEQ ID NO: 12614 - DNA, 273 bp, synthetic construct
  misc_feature 1..273: note = Description of Artificial Sequence: Synthetic polynucleotide
  source 1..273: mol_type = other DNA
ttttagggtttatttaggagggtgtagcggtggttttcggggcggtggtcgtggtgggggtgttagttgtaggggtgttttcggtgggtgggagttggtggtttttcgttggtgttatgggattcgtatgttcgttttgcgtttttcggtttttgagtttataggtcgggattttgtttgttagtcgcgtgcgttgtcgtttaatttttgtaggcgtagagcgcgcggcggcggtgatagagaattttgtttggttgtttaaatatagttttt

SEQ ID NO: 12615 - DNA, 257 bp, synthetic construct
  misc_feature 1..257: note = Description of Artificial Sequence: Synthetic polynucleotide
  source 1..257: mol_type = other DNA
gttgtaggcgggataagtaggttttataggtcgagtttacgagtttttcgaggggtgagcggttcgggttttttggcgttttggtcggttagttaagcgttggattatattttttagaggtacggcgttcggagcgttggattatattttttagaggtatcgttttcggagcgtagttttattttcgttagtttgcgagatttggaggtttcgcgtggggagagggtcgcgtttgtggaggagtttggtttcgtatt

SEQ ID NO: 12616 - DNA, 254 bp, synthetic construct
  misc_feature 1..254: note = Description of Artificial Sequence: Synthetic polynucleotide
  source 1..254: mol_type = other DNA
tttgtatcgttttagagttttgggttgtgttcgcgtagggatcgggtcgggtagagtcgggcggggtggagaggtaagcggagcgcgcggtggggttgaggggaggcgtggggcgagtgttcgttgttcgttttttagtttttttgtttttacgttttttcgttcgtagtcgttcgtagttcggcggtgtagttgtgttggattcggcggcgtcgtagttttttatcgttttttgatgttattggggtgcgggg

SEQ ID NO: 12617 - DNA, 261 bp, Homo sapiens
  source 1..261: mol_type = unassigned DNA
tcttcttgatgtcttcagcttgctttttccaggaggagctgctctcgccgttctcccgggccatggccgacgagcgcggcgcggaggagcggccgggggcgcgctggggagggggcgccgggggcgcggcgcgggcgcagaggcggcggggatgccgggcggctcgggctgcggcgcagcttcctcctctgcagtttcctctttcgctctcgccgccgccgccgcggccgcggtccctccctggctcttatttctgctgtt

SEQ ID NO: 12618 - DNA, 287 bp, Homo sapiens
  source 1..287: mol_type = unassigned DNA
ggtcgcctccctttataggctccgagagcggggcggggttgggggcgggcggggagctgcctcgggtggcctcgcccccagcacggaggaccctccccgcgaggcgccgccgccctggagccccgcccacggcgctcgacggccggggaaactgcgggagctgggcgctcagtgggggaaaacgagccgcggacgcgaaggggcgggatgaggcccccggggcggggctcggggctcggggctgcgtgatacctggaggggtctgtgaagggacattgcgcaaggtt

SEQ ID NO: 12619 - DNA, 235 bp, Homo sapiens
  source 1..235: mol_type = unassigned DNA
ggtcagagtctccaggctcaggtgggcggcggcgtggaccggcgacgggtggcacagctggcatacgcggtccctccacaggtggcggtagacggcggccgggacggcgagcaacagggcggccagccagaccgccagcagcaggcggcgggccagggccgggctgcgcagccgaggcgccaggaaggggcgggtgactgcgaggcagcgctgcaggctgagcaggccggtgagc

SEQ ID NO: 12620 - DNA, 273 bp, Homo sapiens
  source 1..273: mol_type = unassigned DNA
ggaggctgtatttgggcagccaaacaaagttctctgtcaccgccgccgcgcgctctgcgcctgcaagggttaaacggcagcgcacgcggctggcaggcaggatcccggcctgtgggctcaagagccgaggggcgcagggcgaacatgcgagtcccatggcaccagcgagaggccaccaactcccacccaccgagggcacccctgcagctaacacccccaccacgaccaccgccccgggggccaccgctgcaccctcctgggtgagccctggag

SEQ ID NO: 12621 - DNA, 257 bp, Homo sapiens
  source 1..257: mol_type = unassigned DNA
ggtgcggagccaagctcctccacagacgcggccctctccccacgcgaggcctccaaatctcgcaaactaacggaaatgaagctacgctccgggagcggtgcctctgggaaatgtagtccagcgctccggacgccgtgcctctgggaaatgtagtccagcgcttggctagccggccagaacgccaggaggcccgggccgctcacccctcgaggggctcgtgggctcggcctgtggaacctgcttgtcccgcctgcagc

SEQ ID NO: 12622 - DNA, 254 bp, Homo sapiens
  source 1..254: mol_type = unassigned DNA
ccccgcaccccagtgacatcaggaggcgataaaaggctgcggcgccgccggatccagcacagctgcaccgccgagctgcgagcggctgcgagcgagagagcgtaagagcaagagagctagagagcgagcaacgggcactcgccccacgcctcccctcagccccaccgcgcgctccgcttgcctctccaccccgcccgactctacccggcccggtccctgcgcgggcacagcccagagctctggggcggtgcagg

SEQ ID NO: 12623 - DNA, 261 bp, synthetic construct
  misc_feature 1..261: note = Description of Artificial Sequence: Synthetic polynucleotide
  source 1..261: mol_type = other DNA
tcttcttgatgtcttcagcttgctttttccaggaggagctgctctygcygttttttygggttatggtygaygagygyggygyggaggagyggtygggggygygttggggagggggygtygggggygyggygygggygtagaggyggyggggatgtygggyggttygggttgyggygtagtttttttttttgtagttttttttttygttttygtygtygtygtygyggtygyggtttttttttggtttttatttttgttgtt

SEQ ID NO: 12624 - DNA, 287 bp, synthetic construct
  misc_feature 1..287: note = Description of Artificial Sequence: Synthetic polynucleotide
  source 1..287: mol_type = other DNA
ggtygtttttttttataggtttygagagyggggyggggttgggggygggyggggagttgtttygggtggtttygtttttagtayggaggatttttttygygaggygtygtygttttggagtttygtttayggygttygayggtyggggaaattgygggagttgggygtttagtgggggaaaaygagtygyggaygygaaggggygggatgaggttttyggggyggggttyggggttyggggttgygtgatatttggaggggtttgtgaagggatattgygtaaggtt

SEQ ID NO: 12625 - DNA, 235 bp, synthetic construct
  misc_feature 1..235: note = Description of Artificial Sequence: Synthetic polynucleotide
  source 1..235: mol_type = other DNA
ggttagagtttttaggtttaggtgggyggyggygtggatyggygaygggtggtatagttggtataygyggtttttttataggtggyggtagayggyggtygggayggygagtaatagggyggttagttagatygttagtagtaggyggygggttagggtygggttgygtagtygaggygttaggaaggggygggtgattgygaggtagygttgtaggttgagtaggtyggtgagt

SEQ ID NO: 12626 - DNA, 273 bp, synthetic construct
  misc_feature 1..273: note = Description of Artificial Sequence: Synthetic polynucleotide
  source 1..273: mol_type = other DNA
ggaggttgtatttgggtagttaaataaagttttttgttatygtygtygygygttttgygtttgtaagggttaaayggtagygtaygyggttggtaggtaggatttyggtttgtgggtttaagagtygaggggygtagggygaatatgygagttttatggtattagygagaggttattaatttttatttatygagggtatttttgtagttaatatttttattaygattatygtttygggggttatygttgtatttttttgggtgagttttggag

SEQ ID NO: 12627 - DNA, 257 bp, synthetic construct
  misc_feature 1..257: note = Description of Artificial Sequence: Synthetic polynucleotide
  source 1..257: mol_type = other DNA
ggtgyggagttaagtttttttatagaygyggttttttttttaygygaggtttttaaatttygtaaattaayggaaatgaagttaygtttygggagyggtgtttttgggaaatgtagtttagygtttyggaygtygtgtttttgggaaatgtagtttagygtttggttagtyggttagaaygttaggaggttygggtygtttatttttygaggggttygtgggttyggtttgtggaatttgtttgtttygtttgtagt

SEQ ID NO: 12628 - DNA, 254 bp, synthetic construct
  misc_feature 1..254: note = Description of Artificial Sequence: Synthetic polynucleotide
  source 1..254: mol_type = other DNA
cccygtattttagtgatattaggaggygataaaaggttgyggygtygtyggatttagtatagttgtatygtygagttgygagyggttgygagygagagagygtaagagtaagagagttagagagygagtaaygggtattygttttaygtttttttttagttttatygygygtttygtttgtttttttatttygttygattttattyggttyggtttttgygygggtatagtttagagttttggggyggtgtagg

SEQ ID NO: 12629 - DNA, 261 bp, synthetic construct
  misc_feature 1..261: note = Description of Artificial Sequence: Synthetic polynucleotide
  source 1..261: mol_type = other DNA
tcttcttgatgtcttcagcttgctttttccaggaggagctgctctcgccgttttttcgggttatggtcgacgagcgcggcgcggaggagcggtcgggggcgcgttggggagggggcgtcgggggcgcggcgcgggcgtagaggcggcggggatgtcgggcggttcgggttgcggcgtagtttttttttttgtagttttttttttcgttttcgtcgtcgtcgtcgcggtcgcggtttttttttggtttttatttttgttgtt

SEQ ID NO: 12630 - DNA, 287 bp, synthetic construct
  misc_feature 1..287: note = Description of Artificial Sequence: Synthetic polynucleotide
  source 1..287: mol_type = other DNA
ggtcgtttttttttataggtttcgagagcggggcggggttgggggcgggcggggagttgtttcgggtggtttcgtttttagtacggaggatttttttcgcgaggcgtcgtcgttttggagtttcgtttacggcgttcgacggtcggggaaattgcgggagttgggcgtttagtgggggaaaacgagtcgcggacgcgaaggggcgggatgaggttttcggggcggggttcggggttcggggttgcgtgatatttggaggggtttgtgaagggatattgcgtaaggtt

SEQ ID NO: 12631 - DNA, 235 bp, synthetic construct
  misc_feature 1..235: note = Description of Artificial Sequence: Synthetic polynucleotide
  source 1..235: mol_type = other DNA
ggttagagtttttaggtttaggtgggcggcggcgtggatcggcgacgggtggtatagttggtatacgcggtttttttataggtggcggtagacggcggtcgggacggcgagtaatagggcggttagttagatcgttagtagtaggcggcgggttagggtcgggttgcgtagtcgaggcgttaggaaggggcgggtgattgcgaggtagcgttgtaggttgagtaggtcggtgagt

SEQ ID NO: 12632 - DNA, 273 bp, synthetic construct
  misc_feature 1..273: note = Description of Artificial Sequence: Synthetic polynucleotide
  source 1..273: mol_type = other DNA
ggaggttgtatttgggtagttaaataaagttttttgttatcgtcgtcgcgcgttttgcgtttgtaagggttaaacggtagcgtacgcggttggtaggtaggatttcggtttgtgggtttaagagtcgaggggcgtagggcgaatatgcgagttttatggtattagcgagaggttattaatttttatttatcgagggtatttttgtagttaatatttttattacgattatcgtttcgggggttatcgttgtatttttttgggtgagttttggag

SEQ ID NO: 12633 - DNA, 257 bp, synthetic construct
  misc_feature 1..257: note = Description of Artificial Sequence: Synthetic polynucleotide
  source 1..257: mol_type = other DNA
ggtgcggagttaagtttttttatagacgcggttttttttttacgcgaggtttttaaatttcgtaaattaacggaaatgaagttacgtttcgggagcggtgtttttgggaaatgtagtttagcgtttcggacgtcgtgtttttgggaaatgtagtttagcgtttggttagtcggttagaacgttaggaggttcgggtcgtttatttttcgaggggttcgtgggttcggtttgtggaatttgtttgtttcgtttgtagt

SEQ ID NO: 12634 - DNA, 254 bp, synthetic construct
  misc_feature 1..254: note = Description of Artificial Sequence: Synthetic polynucleotide
  source 1..254: mol_type = other DNA
ccccgtattttagtgatattaggaggcgataaaaggttgcggcgtcgtcggatttagtatagttgtatcgtcgagttgcgagcggttgcgagcgagagagcgtaagagtaagagagttagagagcgagtaacgggtattcgttttacgtttttttttagttttatcgcgcgtttcgtttgtttttttatttcgttcgattttattcggttcggtttttgcgcgggtatagtttagagttttggggcggtgtagg

SEQ ID NO: 12635 - DNA, 30 bp, synthetic construct
  misc_feature 1..30: note = Description of Artificial Sequence: Synthetic primer
  source 1..30: mol_type = other DNA
gaatagtagaaataagagttagggagggat

SEQ ID NO: 12636 - DNA, 37 bp, synthetic construct
  misc_feature 1..37: note = Description of Artificial Sequence: Synthetic primer
  source 1..37: mol_type = other DNA
aaattttgygtaatgtttttttatagatttttttagg

SEQ ID NO: 12637 - DNA, 25 bp, synthetic construct
  misc_feature 1..25: note = Description of Artificial Sequence: Synthetic primer
  source 1..25: mol_type = other DNA
gtttatyggtttgtttagtttgtag

SEQ ID NO: 12638 - DNA, 25 bp, synthetic construct
  misc_feature 1..25: note = Description of Artificial Sequence: Synthetic primer
  source 1..25: mol_type = other DNA
ttttagggtttatttaggagggtgt

SEQ ID NO: 12639 - DNA, 29 bp, synthetic construct
  misc_feature 1..29: note = Description of Artificial Sequence: Synthetic primer
  source 1..29: mol_type = other DNA
gttgtaggygggataagtaggttttatag

SEQ ID NO: 12640 - DNA, 30 bp, synthetic construct
  misc_feature 1..30: note = Description of Artificial Sequence: Synthetic primer
  source 1..30: mol_type = other DNA
tttgtatygttttagagttttgggttgtgt

SEQ ID NO: 12641 - DNA, 35 bp, synthetic construct
  misc_feature 1..35: note = Description of Artificial Sequence: Synthetic primer
  source 1..35: mol_type = other DNA
tcttcttaatatcttcaacttactttttccaaaaa

SEQ ID NO: 12642 - DNA, 23 bp, synthetic construct
  misc_feature 1..23: note = Description of Artificial Sequence: Synthetic primer
  source 1..23: mol_type = other DNA
aatcrcctccctttataaactcc

SEQ ID NO: 12643 - DNA, 26 bp, synthetic construct
  misc_feature 1..26: note = Description of Artificial Sequence: Synthetic primer
  source 1..26: mol_type = other DNA
aatcaaaatctccaaactcaaataaa

SEQ ID NO: 12644 - DNA, 33 bp, synthetic construct
  misc_feature 1..33: note = Description of Artificial Sequence: Synthetic primer
  source 1..33: mol_type = other DNA
aaaaactatatttaaacaaccaaacaaaattct

SEQ ID NO: 12645 - DNA, 26 bp, synthetic construct
  misc_feature 1..26: note = Description of Artificial Sequence: Synthetic primer
  source 1..26: mol_type = other DNA
aatacraaaccaaactcctccacaaa

SEQ ID NO: 12646 - DNA, 24 bp, synthetic construct
  misc_feature 1..24: note = Description of Artificial Sequence: Synthetic primer
  source 1..24: mol_type = other DNA
cccrcaccccaataacatcaaaaa

SEQ ID NO: 12647 - DNA, 273 bp, Homo sapiens
  source 1..273: mol_type = unassigned DNA
ggcgctgctggggctgcctggcaacggcttcgtggtgtggagcttggcgggctggcggcctgcacgggggcgaccgctggcggccacgcttgtgctgcacctggcgctggccgacggcgcggtgctgctgctcacgccgctctttgtggccttcctgacccggcaggcctggccgctgggccaggcgggctgcaaggcggtgtactacgtgtgcgcgctcagcatgtacgccagcgtgctgctcaccggcctgctcagcctgcagcgctgcct

SEQ ID NO: 12648 - DNA, 259 bp, Homo sapiens
  source 1..259: mol_type = unassigned DNA
ggtcgtgtgcccaggactgtcccccagcggccactcgggccccagccccccaggcctggccttgacaggcgggcggagcagccagtgcgagacagggaggccggtgcgggtgcgggaacctgatccgcccgggaggcgggggcggggcgggggcgcagcgcgcggggaggggccggcgcccgccttcctcccccattcattcagctgagccagggggcctaggggctcctccggcggctagctctgcactgcaggagcg

SEQ ID NO: 12649 - DNA, 220 bp, Homo sapiens
  source 1..220: mol_type = unassigned DNA
gggaaaagcagcagcccaaaggctctgaattcctcttccccgccacacgcacggaatcctgagcccccggagcctcggggccgaggccggcccgggacggtgctccgagtagctctccactgctggggagccggccctgtttttgtttgaacgttttgtaacgattaagcagatcccggcgtcagcccgccgcggagaggctcaaacaggcataaagtgc

SEQ ID NO: 12650 - DNA, 273 bp, synthetic construct
  misc_feature 1..273: note = Description of Artificial Sequence: Synthetic polynucleotide
  source 1..273: mol_type = other DNA
ggygttgttggggttgtttggtaayggtttygtggtgtggagtttggygggttggyggtttgtaygggggygatygttggyggttaygtttgtgttgtatttggygttggtygayggygyggtgttgttgtttaygtygttttttgtggtttttttgattyggtaggtttggtygttgggttaggygggttgtaaggyggtgtattaygtgtgygygtttagtatgtaygttagygtgttgtttatyggtttgtttagtttgtagygttgttt

SEQ ID NO: 12651 - DNA, 259 bp, synthetic construct
  misc_feature 1..259: note = Description of Artificial Sequence: Synthetic polynucleotide
  source 1..259: mol_type = other DNA
ggtygtgtgtttaggattgttttttagyggttattygggttttagttttttaggtttggttttgataggygggyggagtagttagtgygagatagggaggtyggtgygggtgygggaatttgattygttygggaggygggggyggggygggggygtagygygyggggaggggtyggygttygttttttttttttatttatttagttgagttagggggtttaggggttttttyggyggttagttttgtattgtaggagyg

SEQ ID NO: 12652 - DNA, 220 bp, synthetic construct
  misc_feature 1..220: note = Description of Artificial Sequence: Synthetic polynucleotide
  source 1..220: mol_type = other DNA
gggaaaagtagtagtttaaaggttttgaatttttttttttygttataygtayggaattttgagttttyggagtttyggggtygaggtyggttygggayggtgtttygagtagttttttattgttggggagtyggttttgtttttgtttgaaygttttgtaaygattaagtagatttyggygttagttygtygyggagaggtttaaataggtataaagtgy

SEQ ID NO: 12653 - DNA, 273 bp, synthetic construct
  misc_feature 1..273: note = Description of Artificial Sequence: Synthetic polynucleotide
  source 1..273: mol_type = other DNA
ggcgttgttggggttgtttggtaacggtttcgtggtgtggagtttggcgggttggcggtttgtacgggggcgatcgttggcggttacgtttgtgttgtatttggcgttggtcgacggcgcggtgttgttgtttacgtcgttttttgtggtttttttgattcggtaggtttggtcgttgggttaggcgggttgtaaggcggtgtattacgtgtgcgcgtttagtatgtacgttagcgtgttgtttatcggtttgtttagtttgtagcgttgttt

SEQ ID NO: 12654 - DNA, 259 bp, synthetic construct
  misc_feature 1..259: note = Description of Artificial Sequence: Synthetic polynucleotide
  source 1..259: mol_type = other DNA
ggtcgtgtgtttaggattgttttttagcggttattcgggttttagttttttaggtttggttttgataggcgggcggagtagttagtgcgagatagggaggtcggtgcgggtgcgggaatttgattcgttcgggaggcgggggcggggcgggggcgtagcgcgcggggaggggtcggcgttcgttttttttttttatttatttagttgagttagggggtttaggggttttttcggcggttagttttgtattgtaggagcg

SEQ ID NO: 12655 - DNA, 220 bp, synthetic construct
  misc_feature 1..220: note = Description of Artificial Sequence: Synthetic polynucleotide
  source 1..220: mol_type = other DNA
gggaaaagtagtagtttaaaggttttgaatttttttttttcgttatacgtacggaattttgagttttcggagtttcggggtcgaggtcggttcgggacggtgtttcgagtagttttttattgttggggagtcggttttgtttttgtttgaacgttttgtaacgattaagtagatttcggcgttagttcgtcgcggagaggtttaaataggtataaagtgy

SEQ ID NO: 12656 - DNA, 272 bp, Homo sapiens
  source 1..272: mol_type = unassigned DNA
aggcagcgctgcaggctgagcaggccggtgagcagcacgctggcgtacatgctgagcgcgcacacgtagtacaccgccttgcagcccgcctggcccagcggccaggcctgccgggtcaggaaggccacaaagagcggcgtgagcagcagcaccgcgccgtcggccagcgccaggtgcagcacaagcgtggccgccagcggtcgcccccgtgcaggccgccagcccgccaagctccacaccacgaagccgttgccaggcagccccagcagcgc

SEQ ID NO: 12657 - DNA, 259 bp, Homo sapiens
  source 1..259: mol_type = unassigned DNA
cgctcctgcagtgcagagctagccgccggaggagcccctaggccccctggctcagctgaatgaatgggggaggaaggcgggcgccggcccctccccgcgcgctgcgcccccgccccgcccccgcctcccgggcggatcaggttcccgcacccgcaccggcctccctgtctcgcactggctgctccgcccgcctgtcaaggccaggcctggggggctggggcccgagtggccgctgggggacagtcctgggcacacgacc

SEQ ID NO: 12658 - DNA, 220 bp, Homo sapiens
  source 1..220: mol_type = unassigned DNA
gcactttatgcctgtttgagcctctccgcggcgggctgacgccgggatctgcttaatcgttacaaaacgttcaaacaaaaacagggccggctccccagcagtggagagctactcggagcaccgtcccgggccggcctcggccccgaggctccgggggctcaggattccgtgcgtgtggcggggaagaggaattcagagcctttgggctgctgcttttccc

SEQ ID NO: 12659 - DNA, 272 bp, synthetic construct
  misc_feature 1..272: note = Description of Artificial Sequence: Synthetic polynucleotide
  source 1..272: mol_type = other DNA
aggtagygttgtaggttgagtaggtyggtgagtagtaygttggygtatatgttgagygygtataygtagtatatygttttgtagttygtttggtttagyggttaggtttgtygggttaggaaggttataaagagyggygtgagtagtagtatygygtygtyggttagygttaggtgtagtataagygtggtygttagyggtygttttygtgtaggtygttagttygttaagttttatattaygaagtygttgttaggtagttttagtagygt

SEQ ID NO: 12660 - DNA, 259 bp, synthetic construct
  misc_feature 1..259: note = Description of Artificial Sequence: Synthetic polynucleotide
  source 1..259: mol_type = other DNA
ygtttttgtagtgtagagttagtygtyggaggagtttttaggttttttggtttagttgaatgaatgggggaggaaggygggygtyggttttttttygygygttgygttttygtttygttttygtttttygggyggattaggttttygtattygtatyggtttttttgtttygtattggttgtttygttygtttgttaaggttaggtttggggggttggggttygagtggtygttgggggatagttttgggtataygatt

SEQ ID NO: 12661 - DNA, 220 bp, synthetic construct
  misc_feature 1..220: note = Description of Artificial Sequence: Synthetic polynucleotide
  source 1..220: mol_type = other DNA
gtattttatgtttgtttgagttttttygyggygggttgaygtygggatttgtttaatygttataaaaygtttaaataaaaatagggtyggttttttagtagtggagagttattyggagtatygtttygggtyggtttyggtttygaggtttygggggtttaggatttygtgygtgtggyggggaagaggaatttagagtttttgggttgttgtttttttt

SEQ ID NO: 12662 - DNA, 272 bp, synthetic construct
  misc_feature 1..272: note = Description of Artificial Sequence: Synthetic polynucleotide
  source 1..272: mol_type = other DNA
aggtagcgttgtaggttgagtaggtcggtgagtagtacgttggcgtatatgttgagcgcgtatacgtagtatatcgttttgtagttcgtttggtttagcggttaggtttgtcgggttaggaaggttataaagagcggcgtgagtagtagtatcgcgtcgtcggttagcgttaggtgtagtataagcgtggtcgttagcggtcgttttcgtgtaggtcgttagttcgttaagttttatattacgaagtcgttgttaggtagttttagtagcgt

SEQ ID NO: 12663 - DNA, 259 bp, synthetic construct
  misc_feature 1..259: note = Description of Artificial Sequence: Synthetic polynucleotide
  source 1..259: mol_type = other DNA
cgtttttgtagtgtagagttagtcgtcggaggagtttttaggttttttggtttagttgaatgaatgggggaggaaggcgggcgtcggttttttttcgcgcgttgcgttttcgtttcgttttcgtttttcgggcggattaggttttcgtattcgtatcggtttttttgtttcgtattggttgtttcgttcgtttgttaaggttaggtttggggggttggggttcgagtggtcgttgggggatagttttgggtatacgatt

SEQ ID NO: 12664 - DNA, 220 bp, synthetic construct
  misc_feature 1..220: note = Description of Artificial Sequence: Synthetic polynucleotide
  source 1..220: mol_type = other DNA
gtattttatgtttgtttgagttttttcgcggcgggttgacgtcgggatttgtttaatcgttataaaacgtttaaataaaaatagggtcggttttttagtagtggagagttattcggagtatcgtttcgggtcggtttcggtttcgaggtttcgggggtttaggatttcgtgcgtgtggcggggaagaggaatttagagtttttgggttgttgtttttttt

SEQ ID NO: 12665 - DNA, 24 bp, synthetic construct
  misc_feature 1..24: note = Description of Artificial Sequence: Synthetic primer
  source 1..24: mol_type = other DNA
ggygttgttggggttgtttggtaa

SEQ ID NO: 12666 - DNA, 24 bp, synthetic construct
  misc_feature 1..24: note = Description of Artificial Sequence: Synthetic primer
  source 1..24: mol_type = other DNA
ggtygtgtgtttaggattgttttt

SEQ ID NO: 12667 - DNA, 26 bp, synthetic construct
  misc_feature 1..26: note = Description of Artificial Sequence: Synthetic primer
  source 1..26: mol_type = other DNA
gggaaaagtagtagtttaaaggtttt

SEQ ID NO: 12668 - DNA, 25 bp, synthetic construct
  misc_feature 1..25: note = Description of Artificial Sequence: Synthetic primer
  source 1..25: mol_type = other DNA
aaacaacrctacaaactaaacaaac

SEQ ID NO: 12669 - DNA, 24 bp, synthetic construct
  misc_feature 1..24: note = Description of Artificial Sequence: Synthetic primer
  source 1..24: mol_type = other DNA
crctcctacaatacaaaactaacc

SEQ ID NO: 12670 - DNA, 26 bp, synthetic construct
  misc_feature 1..26: note = Description of Artificial Sequence: Synthetic primer
  source 1..26: mol_type = other DNA
acactttatacctatttaaacctctc

SEQ ID NO: 12671-12682 - skipped (12 entries)

SEQ ID NO: 12683 - DNA, 36 bp, Homo sapiens
  source 1..36: mol_type = unassigned DNA
cggctcacgcagggtgcgcgcacccactgacctgcg

SEQ ID NO: 12684-12704 - skipped (21 entries)

SEQ ID NO: 12705 - DNA, 181 bp, Homo sapiens
  source 1..181: mol_type = unassigned DNA
cggagattgcagtgagccgagatcgtgccattgcactccaatggcactccagcctgatgacagagcgagactccgtctcaaaaataataataaataaataaacaaacaaacaaaaattagctgggcgtggtggcgtgtgcctgtagtcccagctactcgggagactgaggcaggagaatcg

SEQ ID NO: 12706-12715 - skipped (10 entries)

SEQ ID NO: 12716 - DNA, 369 bp, Homo sapiens
  source 1..369: mol_type = unassigned DNA
cgcgtttgaggagcccttcagcccgtcgctgcactgtgggagcccctttctgggctggacaaggctggagccggctccctcagcttgcgggtaggtgtggagagagaggcgtgggcgggaaccgtggctgcaggctgcgcttgcgggccagctcgagttccgggtgggcgtgggcttggcaagccccgcactcggagcggccagccggcccgggcagtgaggagcttagcacctgggccagcagctgctgtgctcgacttctcgctgggccttagctgcctccccgccgggcagggctcgggacctgcagccctccatgcctgagcctccacccccgccgtgcgctcctgtgcagcccaagcctccccg

SEQ ID NO: 12717-12737 - skipped (21 entries)

SEQ ID NO: 12738 - DNA, 35 bp, Homo sapiens
  source 1..35: mol_type = unassigned DNA
cgcttgcaccactacctcgacttcatttactaccg

SEQ ID NO: 12739-12748 - skipped (10 entries)

SEQ ID NO: 12749 - DNA, 487 bp, Homo sapiens
  source 1..487: mol_type = unassigned DNA
cgcccagggcgggaatccagcgcacgggtgaggactttaaaaagcaaggggcaggatgagtcaacaaggttttgagcaggaaaactatgcgataggaagtgtatacattgccctatagcagaaagaccggggacgggaccagcctccaagcgacttcaaacccaaaaggaagcaacttccagactcttatgggcgtctcaatttgctctgggtgaaggaagacaggcaagaatttccaggtctgtgaggaccccacgtcccagggacagaagtgccagggacctgggaagtgcagacttaatacaaggcagagcaaaactcacgcgcctcggtaggacctttactccacgtgatccacttccgggtttgctgcgcaggacagaagccagtcccgggtggggcccccgaacatggtggcggggcctgggtgggacagaggcggggcgcgaggcggagagaccttgccctttagaacaggcaaagggcg

SEQ ID NO: 12750-12759 - skipped (10 entries)

SEQ ID NO: 12760 - DNA, 28 bp, Homo sapiens
  source 1..28: mol_type = unassigned DNA
cgtcttgatctcctgacctcgtgatccg

SEQ ID NO: 12761-12781 - skipped (21 entries)

SEQ ID NO: 12782 - DNA, 18 bp, Homo sapiens
  source 1..18: mol_type = unassigned DNA
cgcgccttcctgaccgcg

SEQ ID NO: 12783 - DNA, 18 bp, Homo sapiens
  source 1..18: mol_type = unassigned DNA
cgcaggtcagtgagtgcg

SEQ ID NO: 12784-12793 - skipped (10 entries)

SEQ ID NO: 12794 - DNA, 87 bp, Homo sapiens
  source 1..87: mol_type = unassigned DNA
cgagccgaagcagggcgaggcattgcctcacctgggaagcgcaaggggtcagagagttccctttccgagtcaaataaatgggtgacg

SEQ ID NO: 12795-12804 - skipped (10 entries)

SEQ ID NO: 12805 - DNA, 11 bp, Homo sapiens
  source 1..11: mol_type = unassigned DNA
cggagcttgcg

SEQ ID NO: 12806-12824 - skipped (19 entries)

SEQ ID NO: 12825 - DNA, 167 bp, Homo sapiens
  source 1..167: mol_type = unassigned DNA
cgcaccgtgggcgagccgaagcagggcgaggcattgcctcacctgggaagcgccaggggtcagggagttccctttccgagtcaaggaaaggggtgaccgacgcacctagaaaatcgggtcactcccacccgaatattgcgcttttcagaccggcttaaaaaatggcg

SEQ ID NO: 12826-12828 - skipped (3 entries)

SEQ ID NO: 12829 - DNA, 185 bp, Homo sapiens
  source 1..185: mol_type = unassigned DNA
cgctgaatgtccaggactgcgaggtctccgtggaggccctgcgctttgtcaaacgccactgcaagcgctgcgtcatcgagcacaccaacccggctttcttctgaagggacagagttcatccggcgttgtattcacacaaacctgaacaaagcaaatttttttaaaagcagcgtatgtaagcaccg

SEQ ID NO: 12830 - DNA, 17 bp, Homo sapiens
  source 1..17: mol_type = unassigned DNA
cgagccgaagcagggcg

SEQ ID NO: 12831 - DNA, 135 bp, Homo sapiens
  source 1..135: mol_type = unassigned DNA
cgtgcgcgagccgaagcagggtaaggcaatgcctcactcgggaagcgccaggggtcagggagttccctttcctagtcaaagaaaggggtgacggacgcacctggaaaatcgggtcactcccacccgaatattgcg

SEQ ID NO: 12832 - skipped

SEQ ID NO: 12833 - DNA, 71 bp, Homo sapiens
  source 1..71: mol_type = unassigned DNA
cgctcgctcttggcgcctcctcggccttggcacccactctggccgcgcttgaggagcccttcagcccgccg

SEQ ID NO: 12834 - DNA, 54 bp, Homo sapiens
  source 1..54: mol_type = unassigned DNA
cgcgcaccgtgcgcgagccgaagcagggcgaggcattgcctcacttgggaagcg

SEQ ID NO: 12835 - skipped

SEQ ID NO: 12836 - DNA, 29 bp, Homo sapiens
  source 1..29: mol_type = unassigned DNA
cgccggtttttaagcccgtaggaaaagcg

SEQ ID NO: 12837 - DNA, 18 bp, Homo sapiens
  source 1..18: mol_type = unassigned DNA
cgctttctagtgtctgcg

SEQ ID NO: 12838-12839 - skipped (2 entries)

SEQ ID NO: 12840 - DNA, 24 bp, Homo sapiens
  source 1..24: mol_type = unassigned DNA
cgaagcgcctcctgcgcagactcg

SEQ ID NO: 12841-12852 - skipped (12 entries)

SEQ ID NO: 12853 - DNA, 12 bp, Homo sapiens
  source 1..12: mol_type = unassigned DNA
cggggcaggtcg

SEQ ID NO: 12854-12874 - skipped (21 entries)

SEQ ID NO: 12875 - DNA, 80 bp, Homo sapiens
  source 1..80: mol_type = unassigned DNA
cgtactcgcgccaggagtatggactcacccagggagtgcttgggcggagaagcagcctctgctccaggccttccgctgcg

SEQ ID NO: 12876-12896 - skipped (21 entries)

SEQ ID NO: 12897 - DNA, 3039 bp, Homo sapiens
  source 1..3039: mol_type = unassigned DNA
cgccagactcggggttgtcgtggagttcctgacttgaacccagggtgcgtgtcgcgcccacggggggacaccccaaagcggcaagaatgccccctgggaagggaacaggacgccaggcttgaaaggggactttgaagcagtccaggaaaaaacttcccacggaccacggtgccttcccggcagcccctttgccaggcccgagggggttgttgtgtcccaggcttgcacccagggttccacggggggcaccccaaagcggcaagtaggttcccaggggaaggggacagcacgtcaggcttggagggggacgttgaggcagccccgggaataaagaggggatgctggggtcctgccacggataacactgtcttcccgacagcatctgtggtgggcctgggagcgtcatggagtccttggcttgcacccaaggtgcgtgtctcgccctcggggggcaccacaaagcggcaagaaggccaccgggggaagggtatgggacgccagggttgaaagggatagttgaggcagtccggggaaaaacgtggcaggctggggtcgtcccatggacgacagtgccttcccagcagcccctgcgtcaggcccggggtggtcgtggagtccctggcttgcaccgagggtgcgggtcgcacccatgggggcaccccaaagtggcaagaaggccgccgggcgaacgccacagaaggccaggctttaatggggatgctgaggcagcacagagagaaaagcggctagtcgggttcctcctacggatgacagtgccttcctggcagtccctgcgctgggcccggggggatcgtggagtccctatcttgcacccagggtgcgtgtttcgcccatgggaggcaccccaaagcggcaagtaggcccctgggggaaggggacagcacctcagacttgaagggggactttgaggtagcccgtggaaaaaaacggcgacgctgagtttctcccacaaacgacagtgccttcctggcagccccttcgctgggccagggtggtcctggagtccgtggcttgcacccagggtgcgtgtctcgctcaagggggcaccccaaagcggcaagtagattcccgggggaagggagagcacgtcaggcttgaaggggaggttgaggcggccccggggtaaaagtggtgaagctggggtcctcccacggatgacaccgccttcctggcagcctctgcagtgggcccagaggtgtcgtggagtctctggcttgctcccaggttgtgtgtctcgcccacgagtggcaccacaaagcagcaagaaggcccccaggggaagggtacaggactccagggttgaaaggtagagttgaggcagaccggtgtcatcccaaggacaacagtgtcttgtccggtagcccctgcatcgggcctggggtggttgtggagtccctggcttgcacccggggtgcgtgtcgtgcccacgatgggcaccgcaatgcggtaagaagtccccgagtggaagggaacaggacgccgagcttgaaaggggacgttgaggcagtccggggaaaaaatttccactgagaacagtgccttcccggcagcctctgagtgggacccaggtggacggtggagcccctggcttggacccagggtgcctgtcttgctcacggggtgcacgtgaaagtggcaacagggcccccgggggaaggggacaacatgtcaggcttgaagagggacgttgggccagccagaggaaaacagcggctaggctgtggtcgtcccacagaccacagtgccttcccggcagcccctgagcctggcccaggcgggggggtttggagtccctgtcttgcaacagagtgcgtgtctcgcctaagtgtgcacgcgaaagctgcaagaagggctccgggggaagggaacaggatgccaggcttgaaaggggactttgaggcagtccagggaaaaactttccacggaggacagtgacttcccgacatcccctgcgcctggccctgggggtcttggagtccctggtttacacccagggtgcgtgcctcgcccacgggtggcaccccaaagcagcaagaaagccccggggggggaagaacaggatgccagacttgaaaggggacgttgaggcagcccaggaaaaaaaggggcgaggctggggtcctttcacggatgacagtgccttccctacagcccctatgccagtcccgggagggtcgcggagtccctgtcttgcacacaatgtgcgtgtctcgcccacggggggcaccccaaagtggcaagaagtcccccgcgggaaggcaacaggacgccaggcttgaatggggacgtttaggtagcctggagaaaaaagcagcgaggctggggtgatcccacgaatgacagtgccttaccggcagcccctttgccgggcatgcgggggttgttgattccctggcttgcacccagggtgagtgtcttgcccacggcgggcaccacaaagcagcaagaaggttcccgggggaaagggacagcacgtcagtcttgaagggggaagttgaggcagccccggggaaaaaaagcggggatgctggggtcctctcacggacgacactgccttcccagcagcctctgcagtgggcccgggagcgtcctggagtccctgtcttgcaccccgggtgcgtgtctcacccacggggagcaccacaaagcggcaagaaggccactgggggaagggtacaggacgccagggttgaaggggatagtggagacagtccaaggaaaaaagtggcgggatggtgtcgtcccaaggatggccacccctgcgccgggccagggatggtcgcggagtccctggcttgcacccaggttgtgtgtctcgcccacagggggcaccccaaagcagcacgaaggcctccaggggaagggaagaggacgccaggcttggaaggtgacgttgaggcagcagggggtaaaaagtggcgggccgggccctcccacggatgacagtgccttcccggaagccgctgcgcagggcccggcgtgtttgtggagtctctggcttgcacccagaatcgtgcg

SEQ ID NO: 12898-12919 - skipped (22 entries)

SEQ ID NO: 12920 - DNA, 36 bp, Homo sapiens
  source 1..36: mol_type = unassigned DNA
cgcaggtcagtgggtgcgcgcaccctgcgtgagccg

SEQ ID NO: 12921-12941 - skipped (21 entries)

SEQ ID NO: 12942 - DNA, 181 bp, Homo sapiens
  source 1..181: mol_type = unassigned DNA
cgattctcctgcctcagtctcccgagtagctgggactacaggcacacgccaccacgcccagctaatttttgtttgtttgtttatttatttattattatttttgagacggagtctcgctctgtcatcaggctggagtgccattggagtgcaatggcacgatctcggctcactgcaatctccg

SEQ ID NO: 12943-12952 - skipped (10 entries)

SEQ ID NO: 12953 - DNA, 369 bp, Homo sapiens
  source 1..369: mol_type = unassigned DNA
cggggaggcttgggctgcacaggagcgcacggcgggggtggaggctcaggcatggagggctgcaggtcccgagccctgcccggcggggaggcagctaaggcccagcgagaagtcgagcacagcagctgctggcccaggtgctaagctcctcactgcccgggccggctggccgctccgagtgcggggcttgccaagcccacgcccacccggaactcgagctggcccgcaagcgcagcctgcagccacggttcccgcccacgcctctctctccacacctacccgcaagctgagggagccggctccagccttgtccagcccagaaaggggctcccacagtgcagcgacgggctgaagggctcctcaaacgcg

SEQ ID NO: 12954-12974 - skipped (21 entries)

SEQ ID NO: 12975 - DNA, 35 bp, Homo sapiens
  source 1..35: mol_type = unassigned DNA
cggtagtaaatgaagtcgaggtagtggtgcaagcg

SEQ ID NO: 12976-12985 - skipped (10 entries)

SEQ ID NO: 12986 - DNA, 487 bp, Homo sapiens
  source 1..487: mol_type = unassigned DNA
cgccctttgcctgttctaaagggcaaggtctctccgcctcgcgccccgcctctgtcccacccaggccccgccaccatgttcgggggccccacccgggactggcttctgtcctgcgcagcaaacccggaagtggatcacgtggagtaaaggtcctaccgaggcgcgtgagttttgctctgccttgtattaagtctgcacttcccaggtccctggcacttctgtccctgggacgtggggtcctcacagacctggaaattcttgcctgtcttccttcacccagagcaaattgagacgcccataagagtctggaagttgcttccttttgggtttgaagtcgcttggaggctggtcccgtccccggtctttctgctatagggcaatgtatacacttcctatcgcatagttttcctgctcaaaaccttgttgactcatcctgccccttgctttttaaagtcctcacccgtgcgctggattcccgccctgggcg

SEQ ID NO: 12987-12996 - skipped (10 entries)

SEQ ID NO: 12997 - DNA, 28 bp, Homo sapiens
  source 1..28: mol_type = unassigned DNA
cggatcacgaggtcaggagatcaagacg

SEQ ID NO: 12998-13018 - skipped (21 entries)

SEQ ID NO: 13019 - DNA, 18 bp, Homo sapiens
  source 1..18: mol_type = unassigned DNA
cgcggtcaggaaggcgcg

SEQ ID NO: 13020 - DNA, 18 bp, Homo sapiens
  source 1..18: mol_type = unassigned DNA
cgcactcactgacctgcg

SEQ ID NO: 13021-13030 - skipped (10 entries)

SEQ ID NO: 13031 - DNA, 87 bp, Homo sapiens
  source 1..87: mol_type = unassigned DNA
cgtcacccatttatttgactcggaaagggaactctctgaccccttgcgcttcccaggtgaggcaatgcctcgccctgcttcggctcg

SEQ ID NO: 13032-13041 - skipped (10 entries)

SEQ ID NO: 13042 - DNA, 11 bp, Homo sapiens
  source 1..11: mol_type = unassigned DNA
cgcaagctccg

SEQ ID NO: 13043-13061 - skipped (19 entries)

SEQ ID NO: 13062 - DNA, 167 bp, Homo sapiens
  source 1..167: mol_type = unassigned DNA
cgccattttttaagccggtctgaaaagcgcaatattcgggtgggagtgacccgattttctaggtgcgtcggtcacccctttccttgactcggaaagggaactccctgacccctggcgcttcccaggtgaggcaatgcctcgccctgcttcggctcgcccacggtgcg

SEQ ID NO: 13063-13065 - skipped (3 entries)

SEQ ID NO: 13066 - DNA, 185 bp, Homo sapiens
  source 1..185: mol_type = unassigned DNA
cggtgcttacatacgctgcttttaaaaaaatttgctttgttcaggtttgtgtgaatacaacgccggatgaactctgtcccttcagaagaaagccgggttggtgtgctcgatgacgcagcgcttgcagtggcgtttgacaaagcgcagggcctccacggagacctcgcagtcctggacattcagcg

SEQ ID NO: 13067 - DNA, 17 bp, Homo sapiens
  source 1..17: mol_type = unassigned DNA
cgccctgcttcggctcg

SEQ ID NO: 13068 - DNA, 135 bp, Homo sapiens
  source 1..135: mol_type = unassigned DNA
cgcaatattcgggtgggagtgacccgattttccaggtgcgtccgtcacccctttctttgactaggaaagggaactccctgacccctggcgcttcccgagtgaggcattgccttaccctgcttcggctcgcgcacg

SEQ ID NO: 13069 - skipped

SEQ ID NO: 13070 - DNA, 71 bp, Homo sapiens
  source 1..71: mol_type = unassigned DNA
cggcgggctgaagggctcctcaagcgcggccagagtgggtgccaaggccgaggaggcgccaagagcgagcg

SEQ ID NO: 13071 - DNA, 54 bp, Homo sapiens
  source 1..54: mol_type = unassigned DNA
cgcttcccaagtgaggcaatgcctcgccctgcttcggctcgcgcacggtgcgcg

SEQ ID NO: 13072 - skipped

SEQ ID NO: 13073 - DNA, 29 bp, Homo sapiens
  source 1..29: mol_type = unassigned DNA
cgcttttcctacgggcttaaaaaccggcg

SEQ ID NO: 13074 - DNA, 18 bp, Homo sapiens
  source 1..18: mol_type = unassigned DNA
cgcagacactagaaagcg

SEQ ID NO: 13075-13076 - skipped (2 entries)

SEQ ID NO: 13077 - DNA, 24 bp, Homo sapiens
  source 1..24: mol_type = unassigned DNA
cgagtctgcgcaggaggcgcttcg

SEQ ID NO: 13078-13089 - skipped (12 entries)

SEQ ID NO: 13090 - DNA, 12 bp, Homo sapiens
  source 1..12: mol_type = unassigned DNA
cgacctgccccg

SEQ ID NO: 13091-13111 - skipped (21 entries)

SEQ ID NO: 13112 - DNA, 80 bp, Homo sapiens
  source 1..80: mol_type = unassigned DNA
cgcagcggaaggcctggagcagaggctgcttctccgcccaagcactccctgggtgagtccatactcctggcgcgagtacg

SEQ ID NO: 13113-13133 - skipped (21 entries)

SEQ ID NO: 13134 - DNA, 3039 bp, Homo sapiens
  source 1..3039: mol_type = unassigned DNA
cgcacgattctgggtgcaagccagagactccacaaacacgccgggccctgcgcagcggcttccgggaaggcactgtcatccgtgggagggcccggcccgccactttttaccccctgctgcctcaacgtcaccttccaagcctggcgtcctcttcccttcccctggaggccttcgtgctgctttggggtgccccctgtgggcgagacacacaacctgggtgcaagccagggactccgcgaccatccctggcccggcgcaggggtggccatccttgggacgacaccatcccgccacttttttccttggactgtctccactatccccttcaaccctggcgtcctgtacccttcccccagtggccttcttgccgctttgtggtgctccccgtgggtgagacacgcacccggggtgcaagacagggactccaggacgctcccgggcccactgcagaggctgctgggaaggcagtgtcgtccgtgagaggaccccagcatccccgctttttttccccggggctgcctcaacttcccccttcaagactgacgtgctgtccctttcccccgggaaccttcttgctgctttgtggtgcccgccgtgggcaagacactcaccctgggtgcaagccagggaatcaacaacccccgcatgcccggcaaaggggctgccggtaaggcactgtcattcgtgggatcaccccagcctcgctgcttttttctccaggctacctaaacgtccccattcaagcctggcgtcctgttgccttcccgcgggggacttcttgccactttggggtgccccccgtgggcgagacacgcacattgtgtgcaagacagggactccgcgaccctcccgggactggcataggggctgtagggaaggcactgtcatccgtgaaaggaccccagcctcgcccctttttttcctgggctgcctcaacgtcccctttcaagtctggcatcctgttcttccccccccggggctttcttgctgctttggggtgccacccgtgggcgaggcacgcaccctgggtgtaaaccagggactccaagacccccagggccaggcgcaggggatgtcgggaagtcactgtcctccgtggaaagtttttccctggactgcctcaaagtcccctttcaagcctggcatcctgttcccttcccccggagcccttcttgcagctttcgcgtgcacacttaggcgagacacgcactctgttgcaagacagggactccaaacccccccgcctgggccaggctcaggggctgccgggaaggcactgtggtctgtgggacgaccacagcctagccgctgttttcctctggctggcccaacgtccctcttcaagcctgacatgttgtccccttcccccgggggccctgttgccactttcacgtgcaccccgtgagcaagacaggcaccctgggtccaagccaggggctccaccgtccacctgggtcccactcagaggctgccgggaaggcactgttctcagtggaaattttttccccggactgcctcaacgtcccctttcaagctcggcgtcctgttcccttccactcggggacttcttaccgcattgcggtgcccatcgtgggcacgacacgcaccccgggtgcaagccagggactccacaaccaccccaggcccgatgcaggggctaccggacaagacactgttgtccttgggatgacaccggtctgcctcaactctacctttcaaccctggagtcctgtacccttcccctgggggccttcttgctgctttgtggtgccactcgtgggcgagacacacaacctgggagcaagccagagactccacgacacctctgggcccactgcagaggctgccaggaaggcggtgtcatccgtgggaggaccccagcttcaccacttttaccccggggccgcctcaacctccccttcaagcctgacgtgctctcccttcccccgggaatctacttgccgctttggggtgcccccttgagcgagacacgcaccctgggtgcaagccacggactccaggaccaccctggcccagcgaaggggctgccaggaaggcactgtcgtttgtgggagaaactcagcgtcgccgtttttttccacgggctacctcaaagtcccccttcaagtctgaggtgctgtccccttcccccaggggcctacttgccgctttggggtgcctcccatgggcgaaacacgcaccctgggtgcaagatagggactccacgatccccccgggcccagcgcagggactgccaggaaggcactgtcatccgtaggaggaacccgactagccgcttttctctctgtgctgcctcagcatccccattaaagcctggccttctgtggcgttcgcccggcggccttcttgccactttggggtgcccccatgggtgcgacccgcaccctcggtgcaagccagggactccacgaccaccccgggcctgacgcaggggctgctgggaaggcactgtcgtccatgggacgaccccagcctgccacgtttttccccggactgcctcaactatccctttcaaccctggcgtcccatacccttcccccggtggccttcttgccgctttgtggtgccccccgagggcgagacacgcaccttgggtgcaagccaaggactccatgacgctcccaggcccaccacagatgctgtcgggaagacagtgttatccgtggcaggaccccagcatcccctctttattcccggggctgcctcaacgtccccctccaagcctgacgtgctgtccccttcccctgggaacctacttgccgctttggggtgccccccgtggaaccctgggtgcaagcctgggacacaacaaccccctcgggcctggcaaaggggctgccgggaaggcaccgtggtccgtgggaagttttttcctggactgcttcaaagtcccctttcaagcctggcgtcctgttcccttcccagggggcattcttgccgctttggggtgtccccccgtgggcgcgacacgcaccctgggttcaagtcaggaactccacgacaaccccgagtctggcg

SEQ ID NO: 13135-13156 - skipped (22 entries)

SEQ ID NO: 13157 - DNA, 36 bp, synthetic construct
  misc_feature 1..36: note = Description of Artificial Sequence: Synthetic oligonucleotide
  source 1..36: mol_type = other DNA
yggtttaygtagggtgygygtatttattgatttgyg

SEQ ID NO: 13158-13178 - skipped (21 entries)

SEQ ID NO: 13179 - DNA, 181 bp, synthetic construct
  misc_feature 1..181: note = Description of Artificial Sequence: Synthetic polynucleotide
  source 1..181: mol_type = other DNA
yggagattgtagtgagtygagatygtgttattgtattttaatggtattttagtttgatgatagagygagatttygttttaaaaataataataaataaataaataaataaataaaaattagttgggygtggtggygtgtgtttgtagttttagttattygggagattgaggtaggagaatyg

SEQ ID NO: 13180-13189 - skipped (10 entries)

SEQ ID NO: 13190 - DNA, 369 bp, synthetic construct
  misc_feature 1..369: note = Description of Artificial Sequence: Synthetic polynucleotide
  source 1..369: mol_type = other DNA
ygygtttgaggagttttttagttygtygttgtattgtgggagtttttttttgggttggataaggttggagtyggtttttttagtttgygggtaggtgtggagagagaggygtgggygggaatygtggttgtaggttgygtttgygggttagttygagtttygggtgggygtgggtttggtaagtttygtattyggagyggttagtyggttygggtagtgaggagtttagtatttgggttagtagttgttgtgttygatttttygttgggttttagttgttttttygtygggtagggttygggatttgtagttttttatgtttgagtttttattttygtygtgygtttttgtgtagtttaagttttttyg

SEQ ID NO: 13191-13211 - skipped (21 entries)

SEQ ID NO: 13212 - DNA, 35 bp, synthetic construct
  misc_feature 1..35: note = Description of Artificial Sequence: Synthetic oligonucleotide
  source 1..35: mol_type = other DNA
ygtttgtattattatttygattttatttattatyg

SEQ ID NO: 13213-13222 - skipped (10 entries)

SEQ ID NO: 13223 - DNA, 487 bp, synthetic construct
  misc_feature 1..487: note = Description of Artificial Sequence: Synthetic polynucleotide
  source 1..487: mol_type = other DNA
ygtttagggygggaatttagygtaygggtgaggattttaaaaagtaaggggtaggatgagttaataaggttttgagtaggaaaattatgygataggaagtgtatatattgttttatagtagaaagatyggggaygggattagtttttaagygattttaaatttaaaaggaagtaatttttagatttttatgggygttttaatttgttttgggtgaaggaagataggtaagaatttttaggtttgtgaggattttaygttttagggatagaagtgttagggatttgggaagtgtagatttaatataaggtagagtaaaatttaygygtttyggtaggatttttattttaygtgatttattttygggtttgttgygtaggatagaagttagtttygggtggggttttygaatatggtggyggggtttgggtgggatagaggyggggygygaggyggagagattttgttttttagaataggtaaagggyg

SEQ ID NO: 13224-13233 - skipped (10 entries)

SEQ ID NO: 13234 - DNA, 28 bp, synthetic construct
  misc_feature 1..28: note = Description of Artificial Sequence: Synthetic oligonucleotide
  source 1..28: mol_type = other DNA
ygttttgattttttgatttygtgattyg

SEQ ID NO: 13235-13255 - skipped (21 entries)

SEQ ID NO: 13256 - DNA, 18 bp, synthetic construct
  misc_feature 1..18: note = Description of Artificial Sequence: Synthetic oligonucleotide
  source 1..18: mol_type = other DNA
ygygtttttttgatygyg

SEQ ID NO: 13257 - DNA, 18 bp, synthetic construct
  misc_feature 1..18: note = Description of Artificial Sequence: Synthetic oligonucleotide
  source 1..18: mol_type = other DNA
ygtaggttagtgagtgyg

SEQ ID NO: 13258-13267 - skipped (10 entries)

SEQ ID NO: 13268 - DNA, 87 bp, synthetic construct
  misc_feature 1..87: note = Description of Artificial Sequence: Synthetic oligonucleotide
  source 1..87: mol_type = other DNA
ygagtygaagtagggygaggtattgttttatttgggaagygtaaggggttagagagtttttttttygagttaaataaatgggtgayg

SEQ ID NO: 13269-13278 - skipped (10 entries)

SEQ ID NO: 13279 - DNA, 11 bp, synthetic construct
  misc_feature 1..11: note = Description of Artificial Sequence: Synthetic oligonucleotide
  source 1..11: mol_type = other DNA
yggagtttgyg

SEQ ID NO: 13280-13298 - skipped (19 entries)

SEQ ID NO: 13299 - DNA, 167 bp, synthetic construct
  misc_feature 1..167: note = Description of Artificial Sequence: Synthetic polynucleotide
  source 1..167: mol_type = other DNA
ygtatygtgggygagtygaagtagggygaggtattgttttatttgggaagygttaggggttagggagtttttttttygagttaaggaaaggggtgatygaygtatttagaaaatygggttatttttattygaatattgygttttttagatyggtttaaaaaatggyg

SEQ ID NO: 13300-13302 - skipped (3 entries)

SEQ ID NO: 13303 - DNA, 185 bp, synthetic construct
  misc_feature 1..185: note = Description of Artificial Sequence: Synthetic polynucleotide
  source 1..185: mol_type = other DNA
ygttgaatgtttaggattgygaggttttygtggaggttttgygttttgttaaaygttattgtaagygttgygttatygagtatattaattyggtttttttttgaagggatagagtttattyggygttgtatttatataaatttgaataaagtaaatttttttaaaagtagygtatgtaagtatyg

SEQ ID NO: 13304 - DNA, 17 bp, synthetic construct
  misc_feature 1..17: note = Description of Artificial Sequence: Synthetic oligonucleotide
  source 1..17: mol_type = other DNA
ygagtygaagtagggyg

SEQ ID NO: 13305 - DNA, 135 bp, synthetic construct
  misc_feature 1..135: note = Description of Artificial Sequence: Synthetic polynucleotide
  source 1..135: mol_type = other DNA
ygtgygygagtygaagtagggtaaggtaatgttttattygggaagygttaggggttagggagtttttttttttagttaaagaaaggggtgayggaygtatttggaaaatygggttatttttattygaatattgyg

SEQ ID NO: 13306 - skipped

SEQ ID NO: 13307 - DNA, 71 bp, synthetic construct
  misc_feature 1..71: note = Description of Artificial Sequence: Synthetic oligonucleotide
  source 1..71: mol_type = other DNA
ygttygtttttggygttttttyggttttggtatttattttggtygygtttgaggagttttttagttygtyg

SEQ ID NO: 13308 - DNA, 54 bp, synthetic construct
  misc_feature 1..54: note = Description of Artificial Sequence: Synthetic oligonucleotide
  source 1..54: mol_type = other DNA
ygygtatygtgygygagtygaagtagggygaggtattgttttatttgggaagyg

SEQ ID NO: 13309 - skipped

SEQ ID NO: 13310 - DNA, 29 bp, synthetic construct
  misc_feature 1..29: note = Description of Artificial Sequence: Synthetic oligonucleotide
  source 1..29: mol_type = other DNA
ygtyggtttttaagttygtaggaaaagyg

SEQ ID NO: 13311 - DNA, 18 bp, synthetic construct
  misc_feature 1..18: note = Description of Artificial Sequence: Synthetic oligonucleotide
  source 1..18: mol_type = other DNA
ygttttttagtgtttgyg

SEQ ID NO: 13312-13313 - skipped (2 entries)

SEQ ID NO: 13314 - DNA, 24 bp, synthetic construct
  misc_feature 1..24: note = Description of Artificial Sequence: Synthetic oligonucleotide
  source 1..24: mol_type = other DNA
ygaagygttttttgygtagattyg

SEQ ID NO: 13315-13326 - skipped (12 entries)

SEQ ID NO: 13327 - DNA, 12 bp, synthetic construct
  misc_feature 1..12: note = Description of Artificial Sequence: Synthetic oligonucleotide
  source 1..12: mol_type = other DNA
yggggtaggtyg

SEQ ID NO: 13328-13348 - skipped (21 entries)

SEQ ID NO: 13349 - DNA, 80 bp, synthetic construct
  misc_feature 1..80: note = Description of Artificial Sequence: Synthetic oligonucleotide
  source 1..80: mol_type = other DNA
ygtattygygttaggagtatggatttatttagggagtgtttgggyggagaagtagtttttgttttaggtttttygttgyg

SEQ ID NO: 13350-13370 - skipped (21 entries)

SEQ ID NO: 13371 - DNA, 3039 bp, synthetic construct
  misc_feature 1..3039: note = Description of Artificial Sequence: Synthetic polynucleotide
  source 1..3039: mol_type = other DNA
ygttagattyggggttgtygtggagtttttgatttgaatttagggtgygtgtygygtttayggggggatattttaaagyggtaagaatgttttttgggaagggaataggaygttaggtttgaaaggggattttgaagtagtttaggaaaaaattttttayggattayggtgttttttyggtagtttttttgttaggttygagggggttgttgtgttttaggtttgtatttagggttttayggggggtattttaaagyggtaagtaggtttttaggggaaggggatagtaygttaggtttggagggggaygttgaggtagtttygggaataaagaggggatgttggggttttgttayggataatattgttttttygatagtatttgtggtgggtttgggagygttatggagtttttggtttgtatttaaggtgygtgtttygttttyggggggtattataaagyggtaagaaggttatygggggaagggtatgggaygttagggttgaaagggatagttgaggtagttyggggaaaaaygtggtaggttggggtygttttatggaygatagtgtttttttagtagtttttgygttaggttyggggtggtygtggagtttttggtttgtatygagggtgygggtygtatttatgggggtattttaaagtggtaagaaggtygtygggygaaygttatagaaggttaggttttaatggggatgttgaggtagtatagagagaaaagyggttagtygggttttttttayggatgatagtgtttttttggtagtttttgygttgggttyggggggatygtggagtttttattttgtatttagggtgygtgtttygtttatgggaggtattttaaagyggtaagtaggtttttgggggaaggggatagtattttagatttgaagggggattttgaggtagttygtggaaaaaaayggygaygttgagttttttttataaaygatagtgtttttttggtagttttttygttgggttagggtggttttggagttygtggtttgtatttagggtgygtgtttygtttaagggggtattttaaagyggtaagtagattttygggggaagggagagtaygttaggtttgaaggggaggttgaggyggtttyggggtaaaagtggtgaagttggggtttttttayggatgatatygtttttttggtagtttttgtagtgggtttagaggtgtygtggagtttttggtttgtttttaggttgtgtgtttygtttaygagtggtattataaagtagtaagaaggtttttaggggaagggtataggattttagggttgaaaggtagagttgaggtagatyggtgttattttaaggataatagtgttttgttyggtagtttttgtatygggtttggggtggttgtggagtttttggtttgtattyggggtgygtgtygtgtttaygatgggtatygtaatgyggtaagaagttttygagtggaagggaataggaygtygagtttgaaaggggaygttgaggtagttyggggaaaaaatttttattgagaatagtgttttttyggtagtttttgagtgggatttaggtggayggtggagtttttggtttggatttagggtgtttgttttgtttayggggtgtaygtgaaagtggtaatagggttttygggggaaggggataatatgttaggtttgaagagggaygttgggttagttagaggaaaatagyggttaggttgtggtygttttatagattatagtgttttttyggtagtttttgagtttggtttaggygggggggtttggagtttttgttttgtaatagagtgygtgtttygtttaagtgtgtaygygaaagttgtaagaagggtttygggggaagggaataggatgttaggtttgaaaggggattttgaggtagtttagggaaaaattttttayggaggatagtgatttttygatattttttgygtttggttttgggggttttggagtttttggtttatatttagggtgygtgtttygtttaygggtggtattttaaagtagtaagaaagtttyggggggggaagaataggatgttagatttgaaaggggaygttgaggtagtttaggaaaaaaaggggygaggttggggtttttttayggatgatagtgttttttttatagtttttatgttagtttygggagggtygyggagtttttgttttgtatataatgtgygtgtttygtttayggggggtattttaaagtggtaagaagtttttygygggaaggtaataggaygttaggtttgaatggggaygtttaggtagtttggagaaaaaagtagygaggttggggtgattttaygaatgatagtgttttatyggtagtttttttgtygggtatgygggggttgttgattttttggtttgtatttagggtgagtgttttgtttayggygggtattataaagtagtaagaaggttttygggggaaagggatagtaygttagttttgaagggggaagttgaggtagtttyggggaaaaaaagyggggatgttggggtttttttayggaygatattgtttttttagtagtttttgtagtgggttygggagygttttggagtttttgttttgtatttygggtgygtgttttatttayggggagtattataaagyggtaagaaggttattgggggaagggtataggaygttagggttgaaggggatagtggagatagtttaaggaaaaaagtggygggatggtgtygttttaaggatggttatttttgygtygggttagggatggtygyggagtttttggtttgtatttaggttgtgtgtttygtttatagggggtattttaaagtagtaygaaggtttttaggggaagggaagaggaygttaggtttggaaggtgaygttgaggtagtagggggtaaaaagtggygggtygggtttttttayggatgatagtgttttttyggaagtygttgygtagggttyggygtgtttgtggagtttttggtttgtatttagaatygtgyg

SEQ ID NO: 13372-13393 - skipped (22 entries)

SEQ ID NO: 13394 - DNA, 36 bp, synthetic construct
  misc_feature 1..36: note = Description of Artificial Sequence: Synthetic oligonucleotide
  source 1..36: mol_type = other DNA
tggtttatgtagggtgtgtgtatttattgatttgtg

SEQ ID NO: 13395-13415 - skipped (21 entries)

SEQ ID NO: 13416 - DNA, 181 bp, synthetic construct
  misc_feature 1..181: note = Description of Artificial Sequence: Synthetic polynucleotide
  source 1..181: mol_type = other DNA
tggagattgtagtgagttgagattgtgttattgtattttaatggtattttagtttgatgatagagtgagattttgttttaaaaataataataaataaataaataaataaataaaaattagttgggtgtggtggtgtgtgtttgtagttttagttatttgggagattgaggtaggagaattg

SEQ ID NO: 13417-13426 - skipped (10 entries)

SEQ ID NO: 13427 - DNA, 369 bp, synthetic construct
  misc_feature 1..369: note = Description of Artificial Sequence: Synthetic polynucleotide
  source 1..369: mol_type = other DNA
tgtgtttgaggagttttttagtttgttgttgtattgtgggagtttttttttgggttggataaggttggagttggtttttttagtttgtgggtaggtgtggagagagaggtgtgggtgggaattgtggttgtaggttgtgtttgtgggttagtttgagttttgggtgggtgtgggtttggtaagttttgtatttggagtggttagttggtttgggtagtgaggagtttagtatttgggttagtagttgttgtgtttgattttttgttgggttttagttgtttttttgttgggtagggtttgggatttgtagttttttatgtttgagtttttatttttgttgtgtgtttttgtgtagtttaagtttttttg

SEQ ID NO: 13428-13448 - skipped (21 entries)

SEQ ID NO: 13449 - DNA, 35 bp, synthetic construct
  misc_feature 1..35: note = Description of Artificial Sequence: Synthetic oligonucleotide
  source 1..35: mol_type = other DNA
tgtttgtattattattttgattttatttattattg

SEQ ID NO: 13450-13459 - skipped (10 entries)

SEQ ID NO: 13460 - DNA, 487 bp, synthetic construct
  misc_feature 1..487: note = Description of Artificial Sequence: Synthetic polynucleotide
  source 1..487: mol_type = other DNA
tgtttagggtgggaatttagtgtatgggtgaggattttaaaaagtaaggggtaggatgagttaataaggttttgagtaggaaaattatgtgataggaagtgtatatattgttttatagtagaaagattggggatgggattagtttttaagtgattttaaatttaaaaggaagtaatttttagatttttatgggtgttttaatttgttttgggtgaaggaagataggtaagaatttttaggtttgtgaggattttatgttttagggatagaagtgttagggatttgggaagtgtagatttaatataaggtagagtaaaatttatgtgttttggtaggatttttattttatgtgatttatttttgggtttgttgtgtaggatagaagttagttttgggtggggtttttgaatatggtggtggggtttgggtgggatagaggtggggtgtgaggtggagagattttgttttttagaataggtaaagggtg

SEQ ID NO: 13461-13470 - skipped (10 entries)

SEQ ID NO: 13471 - DNA, 28 bp, synthetic construct
  misc_feature 1..28: note = Description of Artificial Sequence: Synthetic oligonucleotide
  source 1..28: mol_type = other DNA
tgttttgattttttgattttgtgatttg

SEQ ID NO: 13472-13492 - skipped (21 entries)

SEQ ID NO: 13493 - DNA, 18 bp, synthetic construct
  misc_feature 1..18: note = Description of Artificial Sequence: Synthetic oligonucleotide
  source 1..18: mol_type = other DNA
tgtgtttttttgattgtg

SEQ ID NO: 13494 - DNA, 18 bp, synthetic construct
  misc_feature 1..18: note = Description of Artificial Sequence: Synthetic oligonucleotide
  source 1..18: mol_type = other DNA
tgtaggttagtgagtgtg

SEQ ID NO: 13495-13504 - skipped (10 entries)

SEQ ID NO: 13505 - DNA, 87 bp, synthetic construct
  misc_feature 1..87: note = Description of Artificial Sequence: Synthetic oligonucleotide
  source 1..87: mol_type = other DNA
tgagttgaagtagggtgaggtattgttttatttgggaagtgtaaggggttagagagttttttttttgagttaaataaatgggtgatg

SEQ ID NO: 13506-13515 - skipped (10 entries)

SEQ ID NO: 13516 - DNA, 11 bp, synthetic construct
  misc_feature 1..11: note = Description of Artificial Sequence: Synthetic oligonucleotide
  source 1..11: mol_type = other DNA
tggagtttgtg

SEQ ID NO: 13517-13535 - skipped (19 entries)

SEQ ID NO: 13536 - DNA, 167 bp, synthetic construct
  misc_feature 1..167: note = Description of Artificial Sequence: Synthetic polynucleotide
  source 1..167: mol_type = other DNA
tgtattgtgggtgagttgaagtagggtgaggtattgttttatttgggaagtgttaggggttagggagttttttttttgagttaaggaaaggggtgattgatgtatttagaaaattgggttatttttatttgaatattgtgttttttagattggtttaaaaaatggtg

SEQ ID NO: 13537-13539 - skipped (3 entries)

SEQ ID NO: 13540 - DNA, 185 bp, synthetic construct
  misc_feature 1..185: note = Description of Artificial Sequence: Synthetic polynucleotide
  source 1..185: mol_type = other DNA
tgttgaatgtttaggattgtgaggtttttgtggaggttttgtgttttgttaaatgttattgtaagtgttgtgttattgagtatattaatttggtttttttttgaagggatagagtttatttggtgttgtatttatataaatttgaataaagtaaatttttttaaaagtagtgtatgtaagtattg

SEQ ID NO: 13541 - DNA, 17 bp, synthetic construct
  misc_feature 1..17: note = Description of Artificial Sequence: Synthetic oligonucleotide
  source 1..17: mol_type = other DNA
tgagttgaagtagggtg

SEQ ID NO: 13542 - DNA, 135 bp, synthetic construct
  misc_feature 1..135: note = Description of Artificial Sequence: Synthetic polynucleotide
  source 1..135: mol_type = other DNA
tgtgtgtgagttgaagtagggtaaggtaatgttttatttgggaagtgttaggggttagggagtttttttttttagttaaagaaaggggtgatggatgtatttggaaaattgggttatttttatttgaatattgtg

SEQ ID NO: 13543 - skipped

SEQ ID NO: 13544 - DNA, 71 bp, synthetic construct
  misc_feature 1..71: note = Description of Artificial Sequence: Synthetic oligonucleotide
  source 1..71: mol_type = other DNA
tgtttgtttttggtgtttttttggttttggtatttattttggttgtgtttgaggagttttttagtttgttg

SEQ ID NO: 13545 - DNA, 54 bp, synthetic construct
  misc_feature 1..54: note = Description of Artificial Sequence: Synthetic oligonucleotide
  source 1..54: mol_type = other DNA
tgtgtattgtgtgtgagttgaagtagggtgaggtattgttttatttgggaagtg

SEQ ID NO: 13546 - skipped

SEQ ID NO: 13547 - DNA, 29 bp, synthetic construct
  misc_feature 1..29: note = Description of Artificial Sequence: Synthetic oligonucleotide
  source 1..29: mol_type = other DNA
tgttggtttttaagtttgtaggaaaagtg

SEQ ID NO: 13548 - DNA, 18 bp, synthetic construct
  misc_feature 1..18: note = Description of Artificial Sequence: Synthetic oligonucleotide
  source 1..18: mol_type = other DNA
tgttttttagtgtttgtg

SEQ ID NO: 13549-13550 - skipped (2 entries)

SEQ ID NO: 13551 - DNA, 24 bp, synthetic construct
  misc_feature 1..24: note = Description of Artificial Sequence: Synthetic oligonucleotide
  source 1..24: mol_type = other DNA
tgaagtgttttttgtgtagatttg

SEQ ID NO: 13552-13563 - skipped (12 entries)

SEQ ID NO: 13564 - DNA, 12 bp, synthetic construct
  misc_feature 1..12: note = Description of Artificial Sequence: Synthetic oligonucleotide
  source 1..12: mol_type = other DNA
tggggtaggttg

SEQ ID NO: 13565-13585 - skipped (21 entries)

SEQ ID NO: 13586 - DNA, 80 bp, synthetic construct
  misc_feature 1..80: note = Description of Artificial Sequence: Synthetic oligonucleotide
  source 1..80: mol_type = other DNA
tgtatttgtgttaggagtatggatttatttagggagtgtttgggtggagaagtagtttttgttttaggttttttgttgtg

SEQ ID NO: 13587-13607 - skipped (21 entries)

SEQ ID NO: 13608 - DNA, 3039 bp, synthetic construct
  misc_feature 1..3039: note = Description of Artificial Sequence: Synthetic polynucleotide
  source 1..3039: mol_type = other DNA
tgttagatttggggttgttgtggagtttttgatttgaatttagggtgtgtgttgtgtttatggggggatattttaaagtggtaagaatgttttttgggaagggaataggatgttaggtttgaaaggggattttgaagtagtttaggaaaaaattttttatggattatggtgtttttttggtagtttttttgttaggtttgagggggttgttgtgttttaggtttgtatttagggttttatggggggtattttaaagtggtaagtaggtttttaggggaaggggatagtatgttaggtttggagggggatgttgaggtagttttgggaataaagaggggatgttggggttttgttatggataatattgtttttttgatagtatttgtggtgggtttgggagtgttatggagtttttggtttgtatttaaggtgtgtgttttgtttttggggggtattataaagtggtaagaaggttattgggggaagggtatgggatgttagggttgaaagggatagttgaggtagtttggggaaaaatgtggtaggttggggttgttttatggatgatagtgtttttttagtagtttttgtgttaggtttggggtggttgtggagtttttggtttgtattgagggtgtgggttgtatttatgggggtattttaaagtggtaagaaggttgttgggtgaatgttatagaaggttaggttttaatggggatgttgaggtagtatagagagaaaagtggttagttgggttttttttatggatgatagtgtttttttggtagtttttgtgttgggtttggggggattgtggagtttttattttgtatttagggtgtgtgttttgtttatgggaggtattttaaagtggtaagtaggtttttgggggaaggggatagtattttagatttgaagggggattttgaggtagtttgtggaaaaaaatggtgatgttgagttttttttataaatgatagtgtttttttggtagtttttttgttgggttagggtggttttggagtttgtggtttgtatttagggtgtgtgttttgtttaagggggtattttaaagtggtaagtagatttttgggggaagggagagtatgttaggtttgaaggggaggttgaggtggttttggggtaaaagtggtgaagttggggtttttttatggatgatattgtttttttggtagtttttgtagtgggtttagaggtgttgtggagtttttggtttgtttttaggttgtgtgttttgtttatgagtggtattataaagtagtaagaaggtttttaggggaagggtataggattttagggttgaaaggtagagttgaggtagattggtgttattttaaggataatagtgttttgtttggtagtttttgtattgggtttggggtggttgtggagtttttggtttgtatttggggtgtgtgttgtgtttatgatgggtattgtaatgtggtaagaagtttttgagtggaagggaataggatgttgagtttgaaaggggatgttgaggtagtttggggaaaaaatttttattgagaatagtgtttttttggtagtttttgagtgggatttaggtggatggtggagtttttggtttggatttagggtgtttgttttgtttatggggtgtatgtgaaagtggtaatagggtttttgggggaaggggataatatgttaggtttgaagagggatgttgggttagttagaggaaaatagtggttaggttgtggttgttttatagattatagtgtttttttggtagtttttgagtttggtttaggtgggggggtttggagtttttgttttgtaatagagtgtgtgttttgtttaagtgtgtatgtgaaagttgtaagaagggttttgggggaagggaataggatgttaggtttgaaaggggattttgaggtagtttagggaaaaattttttatggaggatagtgattttttgatattttttgtgtttggttttgggggttttggagtttttggtttatatttagggtgtgtgttttgtttatgggtggtattttaaagtagtaagaaagttttggggggggaagaataggatgttagatttgaaaggggatgttgaggtagtttaggaaaaaaaggggtgaggttggggtttttttatggatgatagtgttttttttatagtttttatgttagttttgggagggttgtggagtttttgttttgtatataatgtgtgtgttttgtttatggggggtattttaaagtggtaagaagttttttgtgggaaggtaataggatgttaggtttgaatggggatgtttaggtagtttggagaaaaaagtagtgaggttggggtgattttatgaatgatagtgttttattggtagtttttttgttgggtatgtgggggttgttgattttttggtttgtatttagggtgagtgttttgtttatggtgggtattataaagtagtaagaaggtttttgggggaaagggatagtatgttagttttgaagggggaagttgaggtagttttggggaaaaaaagtggggatgttggggtttttttatggatgatattgtttttttagtagtttttgtagtgggtttgggagtgttttggagtttttgttttgtattttgggtgtgtgttttatttatggggagtattataaagtggtaagaaggttattgggggaagggtataggatgttagggttgaaggggatagtggagatagtttaaggaaaaaagtggtgggatggtgttgttttaaggatggttatttttgtgttgggttagggatggttgtggagtttttggtttgtatttaggttgtgtgttttgtttatagggggtattttaaagtagtatgaaggtttttaggggaagggaagaggatgttaggtttggaaggtgatgttgaggtagtagggggtaaaaagtggtgggttgggtttttttatggatgatagtgtttttttggaagttgttgtgtagggtttggtgtgtttgtggagtttttggtttgtatttagaattgtgtg

SEQ ID NO: 13609-13630 - skipped (22 entries)

SEQ ID NO: 13631 - DNA, 36 bp, synthetic construct
  misc_feature 1..36: note = Description of Artificial Sequence: Synthetic oligonucleotide
  source 1..36: mol_type = other DNA
ygtaggttagtgggtgygygtattttgygtgagtyg

SEQ ID NO: 13632-13652 - skipped (21 entries)

SEQ ID NO: 13653 - DNA, 181 bp, synthetic construct
  misc_feature 1..181: note = Description of Artificial Sequence: Synthetic polynucleotide
  source 1..181: mol_type = other DNA
ygatttttttgttttagtttttygagtagttgggattataggtataygttattaygtttagttaatttttgtttgtttgtttatttatttattattatttttgagayggagtttygttttgttattaggttggagtgttattggagtgtaatggtaygatttyggtttattgtaattttyg

SEQ ID NO: 13654-13663 - skipped (10 entries)

SEQ ID NO: 13664 - DNA, 369 bp, synthetic construct
  misc_feature 1..369: note = Description of Artificial Sequence: Synthetic polynucleotide
  source 1..369: mol_type = other DNA
yggggaggtttgggttgtataggagygtayggygggggtggaggtttaggtatggagggttgtaggtttygagttttgttyggyggggaggtagttaaggtttagygagaagtygagtatagtagttgttggtttaggtgttaagttttttattgttygggtyggttggtygtttygagtgyggggtttgttaagtttaygtttattyggaattygagttggttygtaagygtagtttgtagttayggttttygtttaygtttttttttttatatttattygtaagttgagggagtyggttttagttttgtttagtttagaaaggggtttttatagtgtagygaygggttgaagggttttttaaaygyg

SEQ ID NO: 13665-13685 - skipped (21 entries)

SEQ ID NO: 13686 - DNA, 35 bp, synthetic construct
  misc_feature 1..35: note = Description of Artificial Sequence: Synthetic oligonucleotide
  source 1..35: mol_type = other DNA
yggtagtaaatgaagtygaggtagtggtgtaagyg

SEQ ID NO: 13687-13696 - skipped (10 entries)

SEQ ID NO: 13697 - DNA, 487 bp, synthetic construct
  misc_feature 1..487: note = Description of Artificial Sequence: Synthetic polynucleotide
  source 1..487: mol_type = other DNA
ygttttttgtttgttttaaagggtaaggttttttygtttygygtttygtttttgttttatttaggtttygttattatgttygggggttttattygggattggtttttgttttgygtagtaaattyggaagtggattaygtggagtaaaggttttatygaggygygtgagttttgttttgttttgtattaagtttgtattttttaggtttttggtatttttgtttttgggaygtggggtttttatagatttggaaatttttgtttgtttttttttatttagagtaaattgagaygtttataagagtttggaagttgtttttttttgggtttgaagtygtttggaggttggtttygttttyggtttttttgttatagggtaatgtatatattttttatygtatagtttttttgtttaaaattttgttgatttattttgttttttgttttttaaagtttttattygtgygttggattttygttttgggyg

SEQ ID NO: 13698-13707 - skipped (10 entries)

SEQ ID NO: 13708 - DNA, 28 bp, synthetic construct
  misc_feature 1..28: note = Description of Artificial Sequence: Synthetic oligonucleotide
  source 1..28: mol_type = other DNA
yggattaygaggttaggagattaagayg

SEQ ID NO: 13709-13729 - skipped (21 entries)

SEQ ID NO: 13730 - DNA, 18 bp, synthetic construct
  misc_feature 1..18: note = Description of Artificial Sequence: Synthetic oligonucleotide
  source 1..18: mol_type = other DNA
ygyggttaggaaggygyg

SEQ ID NO: 13731 - DNA, 18 bp, synthetic construct
  misc_feature 1..18: note = Description of Artificial Sequence: Synthetic oligonucleotide
  source 1..18: mol_type = other DNA
ygtatttattgatttgyg

SEQ ID NO: 13732-13741 - skipped (10 entries)

SEQ ID NO: 13742 - DNA, 87 bp, synthetic construct
  misc_feature 1..87: note = Description of Artificial Sequence: Synthetic oligonucleotide
  source 1..87: mol_type = other DNA
ygttatttatttatttgattyggaaagggaattttttgattttttgygttttttaggtgaggtaatgtttygttttgtttyggttyg

SEQ ID NO: 13743-13752 - skipped (10 entries)

SEQ ID NO: 13753 - DNA, 11 bp, synthetic construct
  misc_feature 1..11: note = Description of Artificial Sequence: Synthetic oligonucleotide
  source 1..11: mol_type = other DNA
ygtaagtttyg

SEQ ID NO: 13754-13772 - skipped (19 entries)

SEQ ID NO: 13773 - DNA, 167 bp, synthetic construct
  misc_feature 1..167: note = Description of Artificial Sequence: Synthetic polynucleotide
  source 1..167: mol_type = other DNA
ygttattttttaagtyggtttgaaaagygtaatattygggtgggagtgattygattttttaggtgygtyggttatttttttttttgattyggaaagggaattttttgatttttggygttttttaggtgaggtaatgtttygttttgtttyggttygtttayggtgyg

SEQ ID NO: 13774-13776 - skipped (3 entries)

SEQ ID NO: 13777 - DNA, 185 bp, synthetic construct
  misc_feature 1..185: note = Description of Artificial Sequence: Synthetic polynucleotide
  source 1..185: mol_type = other DNA
yggtgtttatataygttgtttttaaaaaaatttgttttgtttaggtttgtgtgaatataaygtyggatgaattttgtttttttagaagaaagtygggttggtgtgttygatgaygtagygtttgtagtggygtttgataaagygtagggtttttayggagatttygtagttttggatatttagyg

SEQ ID NO: 13778 - DNA, 17 bp, synthetic construct
  misc_feature 1..17: note = Description of Artificial Sequence: Synthetic oligonucleotide
  source 1..17: mol_type = other DNA
ygttttgtttyggttyg

SEQ ID NO: 13779 - DNA, 135 bp, synthetic construct
  misc_feature 1..135: note = Description of Artificial Sequence: Synthetic polynucleotide
  source 1..135: mol_type = other DNA
ygtaatattygggtgggagtgattygattttttaggtgygttygttatttttttttttgattaggaaagggaattttttgatttttggygtttttygagtgaggtattgttttattttgtttyggttygygtayg

SEQ ID NO: 13780 - skipped

SEQ ID NO: 13781 - DNA, 71 bp, synthetic construct
  misc_feature 1..71: note = Description of Artificial Sequence: Synthetic oligonucleotide
  source 1..71: mol_type = other DNA
yggygggttgaagggttttttaagygyggttagagtgggtgttaaggtygaggaggygttaagagygagyg

SEQ ID NO: 13782 - DNA, 54 bp, synthetic construct
  misc_feature 1..54: note = Description of Artificial Sequence: Synthetic oligonucleotide
  source 1..54: mol_type = other DNA
ygttttttaagtgaggtaatgtttygttttgtttyggttygygtayggtgygyg

SEQ ID NO: 13783 - skipped

SEQ ID NO: 13784 - DNA, 29 bp, synthetic construct
  misc_feature 1..29: note = Description of Artificial Sequence: Synthetic oligonucleotide
  source 1..29: mol_type = other DNA
ygttttttttaygggtttaaaaatyggyg

SEQ ID NO: 13785 - DNA, 18 bp, synthetic construct
  misc_feature 1..18: note = Description of Artificial Sequence: Synthetic oligonucleotide
  source 1..18: mol_type = other DNA
ygtagatattagaaagyg

SEQ ID NO: 13786-13787 - skipped (2 entries)

SEQ ID NO: 13788 - DNA, 24 bp, synthetic construct
  misc_feature 1..24: note = Description of Artificial Sequence: Synthetic oligonucleotide
  source 1..24: mol_type = other DNA
ygagtttgygtaggaggygtttyg

SEQ ID NO: 13789-13800 - skipped (12 entries)

SEQ ID NO: 13801 - DNA, 12 bp, synthetic construct
  misc_feature 1..12: note = Description of Artificial Sequence: Synthetic oligonucleotide
  source 1..12: mol_type = other DNA
ygatttgtttyg

SEQ ID NO: 13802-13822 - skipped (21 entries)

SEQ ID NO: 13823 - DNA, 80 bp, synthetic construct
  misc_feature 1..80: note = Description of Artificial Sequence: Synthetic oligonucleotide
  source 1..80: mol_type = other DNA
ygtagyggaaggtttggagtagaggttgttttttygtttaagtattttttgggtgagtttatatttttggygygagtayg

SEQ ID NO: 13824-13844 - skipped (21 entries)

SEQ ID NO: 13845 - DNA, 3039 bp, synthetic construct
  misc_feature 1..3039: note = Description of Artificial Sequence: Synthetic polynucleotide
  source 1..3039: mol_type = other DNA
ygtaygattttgggtgtaagttagagattttataaataygtygggttttgygtagyggttttygggaaggtattgttattygtgggagggttyggttygttattttttattttttgttgttttaaygttattttttaagtttggygtttttttttttttttttggaggttttygtgttgttttggggtgttttttgtgggygagatatataatttgggtgtaagttagggatttygygattatttttggttyggygtaggggtggttatttttgggaygatattatttygttatttttttttttggattgtttttattattttttttaattttggygttttgtattttttttttagtggtttttttgtygttttgtggtgtttttygtgggtgagataygtattyggggtgtaagatagggattttaggaygttttygggtttattgtagaggttgttgggaaggtagtgtygttygtgagaggattttagtattttygtttttttttttyggggttgttttaatttttttttttaagattgaygtgttgtttttttttttygggaatttttttgttgttttgtggtgttygtygtgggtaagatatttattttgggtgtaagttagggaattaataattttygtatgttyggtaaaggggttgtyggtaaggtattgttattygtgggattattttagtttygttgtttttttttttaggttatttaaaygtttttatttaagtttggygttttgttgttttttygygggggattttttgttattttggggtgtttttygtgggygagataygtatattgtgtgtaagatagggatttygygattttttygggattggtataggggttgtagggaaggtattgttattygtgaaaggattttagtttygttttttttttttttgggttgttttaaygtttttttttaagtttggtattttgttttttttttttyggggtttttttgttgttttggggtgttattygtgggygaggtaygtattttgggtgtaaattagggattttaagatttttagggttaggygtaggggatgtygggaagttattgtttttygtggaaagtttttttttggattgttttaaagtttttttttaagtttggtattttgtttttttttttyggagttttttttgtagttttygygtgtatatttaggygagataygtattttgttgtaagatagggattttaaattttttygtttgggttaggtttaggggttgtygggaaggtattgtggtttgtgggaygattatagtttagtygttgtttttttttggttggtttaaygtttttttttaagtttgatatgttgtttttttttttygggggttttgttgttatttttaygtgtatttygtgagtaagataggtattttgggtttaagttaggggttttatygtttatttgggttttatttagaggttgtygggaaggtattgtttttagtggaaatttttttttyggattgttttaaygtttttttttaagttyggygttttgtttttttttattyggggattttttatygtattgyggtgtttatygtgggtaygataygtatttygggtgtaagttagggattttataattattttaggttygatgtaggggttatyggataagatattgttgtttttgggatgatatyggtttgttttaattttattttttaattttggagttttgtattttttttttgggggtttttttgttgttttgtggtgttattygtgggygagatatataatttgggagtaagttagagattttaygatatttttgggtttattgtagaggttgttaggaaggyggtgttattygtgggaggattttagttttattatttttatttyggggtygttttaattttttttttaagtttgaygtgtttttttttttttygggaatttatttgtygttttggggtgtttttttgagygagataygtattttgggtgtaagttayggattttaggattattttggtttagygaaggggttgttaggaaggtattgtygtttgtgggagaaatttagygtygtygtttttttttaygggttattttaaagtttttttttaagtttgaggtgttgttttttttttttaggggtttatttgtygttttggggtgttttttatgggygaaataygtattttgggtgtaagatagggattttaygattttttygggtttagygtagggattgttaggaaggtattgttattygtaggaggaattygattagtygtttttttttttgtgttgttttagtatttttattaaagtttggttttttgtggygttygttyggyggtttttttgttattttggggtgtttttatgggtgygattygtattttyggtgtaagttagggattttaygattatttygggtttgaygtaggggttgttgggaaggtattgtygtttatgggaygattttagtttgttaygttttttttyggattgttttaattattttttttaattttggygttttatatttttttttyggtggtttttttgtygttttgtggtgtttttygagggygagataygtattttgggtgtaagttaaggattttatgaygtttttaggtttattatagatgttgtygggaagatagtgttattygtggtaggattttagtattttttttttattttyggggttgttttaaygtttttttttaagtttgaygtgttgttttttttttttgggaatttatttgtygttttggggtgtttttygtggaattttgggtgtaagtttgggatataataattttttygggtttggtaaaggggttgtygggaaggtatygtggttygtgggaagtttttttttggattgttttaaagtttttttttaagtttggygttttgttttttttttagggggtatttttgtygttttggggtgttttttygtgggygygataygtattttgggtttaagttaggaattttaygataatttygagtttggyg

SEQ ID NO: 13846-13867 - skipped (22 entries)

SEQ ID NO: 13868 - DNA, 36 bp, synthetic construct
  misc_feature 1..36: note = Description of Artificial Sequence: Synthetic oligonucleotide
  source 1..36: mol_type = other DNA
tgtaggttagtgggtgtgtgtattttgtgtgagttg

SEQ ID NO: 13869-13889 - skipped (21 entries)

SEQ ID NO: 13890 - DNA, 181 bp, synthetic construct
  misc_feature 1..181: note = Description of Artificial Sequence: Synthetic polynucleotide
  source 1..181: mol_type = other DNA
tgatttttttgttttagttttttgagtagttgggattataggtatatgttattatgtttagttaatttttgtttgtttgtttatttatttattattatttttgagatggagttttgttttgttattaggttggagtgttattggagtgtaatggtatgattttggtttattgtaatttttg

SEQ ID NO: 13891-13900 - skipped (10 entries)

SEQ ID NO: 13901 - DNA, 369 bp, synthetic construct
  misc_feature 1..369: note = Description of Artificial Sequence: Synthetic polynucleotide
  source 1..369: mol_type = other DNA
tggggaggtttgggttgtataggagtgtatggtgggggtggaggtttaggtatggagggttgtaggttttgagttttgtttggtggggaggtagttaaggtttagtgagaagttgagtatagtagttgttggtttaggtgttaagttttttattgtttgggttggttggttgttttgagtgtggggtttgttaagtttatgtttatttggaatttgagttggtttgtaagtgtagtttgtagttatggtttttgtttatgtttttttttttatatttatttgtaagttgagggagttggttttagttttgtttagtttagaaaggggtttttatagtgtagtgatgggttgaagggttttttaaatgtg

SEQ ID NO: 13902-13922 - skipped (21 entries)

SEQ ID NO: 13923 - DNA, 35 bp, synthetic construct
  misc_feature 1..35: note = Description of Artificial Sequence: Synthetic oligonucleotide
  source 1..35: mol_type = other DNA
tggtagtaaatgaagttgaggtagtggtgtaagtg

SEQ ID NO: 13924-13933 - skipped (10 entries)

SEQ ID NO: 13934 - DNA, 487 bp, synthetic construct
  misc_feature 1..487: note = Description of Artificial Sequence: Synthetic polynucleotide
  source 1..487: mol_type = other DNA
tgttttttgtttgttttaaagggtaaggtttttttgttttgtgttttgtttttgttttatttaggttttgttattatgtttgggggttttatttgggattggtttttgttttgtgtagtaaatttggaagtggattatgtggagtaaaggttttattgaggtgtgtgagttttgttttgttttgtattaagtttgtattttttaggtttttggtatttttgtttttgggatgtggggtttttatagatttggaaatttttgtttgtttttttttatttagagtaaattgagatgtttataagagtttggaagttgtttttttttgggtttgaagttgtttggaggttggttttgtttttggtttttttgttatagggtaatgtatatattttttattgtatagtttttttgtttaaaattttgttgatttattttgttttttgttttttaaagtttttatttgtgtgttggatttttgttttgggtg

SEQ ID NO: 13935-13944 - skipped (10 entries)

SEQ ID NO: 13945 - DNA, 28 bp, synthetic construct
  misc_feature 1..28: note = Description of Artificial Sequence: Synthetic oligonucleotide
  source 1..28: mol_type = other DNA
tggattatgaggttaggagattaagatg

SEQ ID NO: 13946-13966 - skipped (21 entries)

SEQ ID NO: 13967 - DNA, 18 bp, synthetic construct
  misc_feature 1..18: note = Description of Artificial Sequence: Synthetic oligonucleotide
  source 1..18: mol_type = other DNA
tgtggttaggaaggtgtg

SEQ ID NO: 13968 - DNA, 18 bp, synthetic construct
  misc_feature 1..18: note = Description of Artificial Sequence: Synthetic oligonucleotide
  source 1..18: mol_type = other DNA
tgtatttattgatttgtg

SEQ ID NO: 13969-13978 - skipped (10 entries)

SEQ ID NO: 13979 - DNA, 87 bp, synthetic construct
  misc_feature 1..87: note = Description of Artificial Sequence: Synthetic oligonucleotide
  source 1..87: mol_type = other DNA
tgttatttatttatttgatttggaaagggaattttttgattttttgtgttttttaggtgaggtaatgttttgttttgttttggtttg

SEQ ID NO: 13980-13989 - skipped (10 entries)

SEQ ID NO: 13990 - DNA, 11 bp, synthetic construct
  misc_feature 1..11: note = Description of Artificial Sequence: Synthetic oligonucleotide
  source 1..11: mol_type = other DNA
tgtaagttttg

SEQ ID NO: 13991-14009 - skipped (19 entries)

SEQ ID NO: 14010 - DNA, 167 bp, synthetic construct
  misc_feature 1..167: note = Description of Artificial Sequence: Synthetic polynucleotide
  source 1..167: mol_type = other DNA
tgttattttttaagttggtttgaaaagtgtaatatttgggtgggagtgatttgattttttaggtgtgttggttatttttttttttgatttggaaagggaattttttgatttttggtgttttttaggtgaggtaatgttttgttttgttttggtttgtttatggtgtg

SEQ ID NO: 14011-14013 - skipped (3 entries)

SEQ ID NO: 14014 - DNA, 185 bp, synthetic construct
  misc_feature 1..185: note = Description of Artificial Sequence: Synthetic polynucleotide
  source 1..185: mol_type = other DNA
tggtgtttatatatgttgtttttaaaaaaatttgttttgtttaggtttgtgtgaatataatgttggatgaattttgtttttttagaagaaagttgggttggtgtgtttgatgatgtagtgtttgtagtggtgtttgataaagtgtagggtttttatggagattttgtagttttggatatttagtg

SEQ ID NO: 14015 - DNA, 17 bp, synthetic construct
  misc_feature 1..17: note = Description of Artificial Sequence: Synthetic oligonucleotide
  source 1..17: mol_type = other DNA
tgttttgttttggtttg

SEQ ID NO: 14016 - DNA, 135 bp, synthetic construct
  misc_feature 1..135: note = Description of Artificial Sequence: Synthetic polynucleotide
  source 1..135: mol_type = other DNA
tgtaatatttgggtgggagtgatttgattttttaggtgtgtttgttatttttttttttgattaggaaagggaattttttgatttttggtgttttttgagtgaggtattgttttattttgttttggtttgtgtatg

SEQ ID NO: 14017 - skipped

SEQ ID NO: 14018 - DNA, 71 bp, synthetic construct
  misc_feature 1..71: note = Description of Artificial Sequence: Synthetic oligonucleotide
  source 1..71: mol_type = other DNA
tggtgggttgaagggttttttaagtgtggttagagtgggtgttaaggttgaggaggtgttaagagtgagtg

SEQ ID NO: 14019 - DNA, 54 bp, synthetic construct
  misc_feature 1..54: note = Description of Artificial Sequence: Synthetic oligonucleotide
  source 1..54: mol_type = other DNA
tgttttttaagtgaggtaatgttttgttttgttttggtttgtgtatggtgtgtg

SEQ ID NO: 14020 - skipped

SEQ ID NO: 14021 - DNA, 29 bp, synthetic construct
  misc_feature 1..29: note = Description of Artificial Sequence: Synthetic oligonucleotide
  source 1..29: mol_type = other DNA
tgttttttttatgggtttaaaaattggtg

SEQ ID NO: 14022 - DNA, 18 bp, synthetic construct
  misc_feature 1..18: note = Description of Artificial Sequence: Synthetic oligonucleotide
  source 1..18: mol_type = other DNA
tgtagatattagaaagtg

SEQ ID NO: 14023-14024 - skipped (2 entries)

SEQ ID NO: 14025 - DNA, 24 bp, synthetic construct
  misc_feature 1..24: note = Description of Artificial Sequence: Synthetic oligonucleotide
  source 1..24: mol_type = other DNA
tgagtttgtgtaggaggtgttttg

SEQ ID NO: 14026-14037 - skipped (12 entries)

SEQ ID NO: 14038 - DNA, 12 bp, synthetic construct
  misc_feature 1..12: note = Description of Artificial Sequence: Synthetic oligonucleotide
  source 1..12: mol_type = other DNA
tgatttgttttg

SEQ ID NO: 14039-14059 - skipped (21 entries)

SEQ ID NO: 14060 - DNA, 80 bp, synthetic construct
  misc_feature 1..80: note = Description of Artificial Sequence: Synthetic oligonucleotide
  source 1..80: mol_type = other DNA
tgtagtggaaggtttggagtagaggttgtttttttgtttaagtattttttgggtgagtttatatttttggtgtgagtatg

SEQ ID NO: 14061-14081 - skipped (21 entries)

SEQ ID NO: 14082 - DNA, 3039 bp, synthetic construct
  misc_feature 1..3039: note = Description of Artificial Sequence: Synthetic polynucleotide
  source 1..3039: mol_type = other DNA
tgtatgattttgggtgtaagttagagattttataaatatgttgggttttgtgtagtggtttttgggaaggtattgttatttgtgggagggtttggtttgttattttttattttttgttgttttaatgttattttttaagtttggtgtttttttttttttttttggaggtttttgtgttgttttggggtgttttttgtgggtgagatatataatttgggtgtaagttagggattttgtgattatttttggtttggtgtaggggtggttatttttgggatgatattattttgttatttttttttttggattgtttttattattttttttaattttggtgttttgtattttttttttagtggtttttttgttgttttgtggtgttttttgtgggtgagatatgtatttggggtgtaagatagggattttaggatgtttttgggtttattgtagaggttgttgggaaggtagtgttgtttgtgagaggattttagtatttttgttttttttttttggggttgttttaatttttttttttaagattgatgtgttgttttttttttttgggaatttttttgttgttttgtggtgtttgttgtgggtaagatatttattttgggtgtaagttagggaattaataatttttgtatgtttggtaaaggggttgttggtaaggtattgttatttgtgggattattttagttttgttgtttttttttttaggttatttaaatgtttttatttaagtttggtgttttgttgtttttttgtgggggattttttgttattttggggtgttttttgtgggtgagatatgtatattgtgtgtaagatagggattttgtgatttttttgggattggtataggggttgtagggaaggtattgttatttgtgaaaggattttagttttgttttttttttttttgggttgttttaatgtttttttttaagtttggtattttgtttttttttttttggggtttttttgttgttttggggtgttatttgtgggtgaggtatgtattttgggtgtaaattagggattttaagatttttagggttaggtgtaggggatgttgggaagttattgttttttgtggaaagtttttttttggattgttttaaagtttttttttaagtttggtattttgttttttttttttggagttttttttgtagtttttgtgtgtatatttaggtgagatatgtattttgttgtaagatagggattttaaatttttttgtttgggttaggtttaggggttgttgggaaggtattgtggtttgtgggatgattatagtttagttgttgtttttttttggttggtttaatgtttttttttaagtttgatatgttgttttttttttttgggggttttgttgttatttttatgtgtattttgtgagtaagataggtattttgggtttaagttaggggttttattgtttatttgggttttatttagaggttgttgggaaggtattgtttttagtggaaattttttttttggattgttttaatgtttttttttaagtttggtgttttgtttttttttatttggggattttttattgtattgtggtgtttattgtgggtatgatatgtattttgggtgtaagttagggattttataattattttaggtttgatgtaggggttattggataagatattgttgtttttgggatgatattggtttgttttaattttattttttaattttggagttttgtattttttttttgggggtttttttgttgttttgtggtgttatttgtgggtgagatatataatttgggagtaagttagagattttatgatatttttgggtttattgtagaggttgttaggaaggtggtgttatttgtgggaggattttagttttattatttttattttggggttgttttaattttttttttaagtttgatgtgttttttttttttttgggaatttatttgttgttttggggtgtttttttgagtgagatatgtattttgggtgtaagttatggattttaggattattttggtttagtgaaggggttgttaggaaggtattgttgtttgtgggagaaatttagtgttgttgtttttttttatgggttattttaaagtttttttttaagtttgaggtgttgttttttttttttaggggtttatttgttgttttggggtgttttttatgggtgaaatatgtattttgggtgtaagatagggattttatgatttttttgggtttagtgtagggattgttaggaaggtattgttatttgtaggaggaatttgattagttgtttttttttttgtgttgttttagtatttttattaaagtttggttttttgtggtgtttgtttggtggtttttttgttattttggggtgtttttatgggtgtgatttgtatttttggtgtaagttagggattttatgattattttgggtttgatgtaggggttgttgggaaggtattgttgtttatgggatgattttagtttgttatgtttttttttggattgttttaattattttttttaattttggtgttttatattttttttttggtggtttttttgttgttttgtggtgttttttgagggtgagatatgtattttgggtgtaagttaaggattttatgatgtttttaggtttattatagatgttgttgggaagatagtgttatttgtggtaggattttagtattttttttttatttttggggttgttttaatgtttttttttaagtttgatgtgttgttttttttttttgggaatttatttgttgttttggggtgttttttgtggaattttgggtgtaagtttgggatataataatttttttgggtttggtaaaggggttgttgggaaggtattgtggtttgtgggaagtttttttttggattgttttaaagtttttttttaagtttggtgttttgttttttttttagggggtatttttgttgttttggggtgtttttttgtgggtgtgatatgtattttgggtttaagttaggaattttatgataattttgagtttggtg

SEQ ID NO: 14083-14092 - skipped (10 entries)

SEQ ID NO: 14093 - DNA, 201 bp, Homo sapiens
  source 1..201: mol_type = unassigned DNA
gagtgcagtggcgtgatctcggctcactgcaagctccgcctcccgggatcacgccattctcctgcctcagcctcccgagtggctgggacttacaggtgcccgccaacatgcccggctaattttctgtatttttagtagagacggggtttcaccgtgttagccaggatggtctcgatatcctgacctcgtgacccgcccacc

SEQ ID NO: 14094 - DNA, 208 bp, Homo sapiens
  source 1..208: mol_type = unassigned DNA
ctggctaacatgatgaaaccctgtctctactaaaaatataaaaaattagccgggcgtggtggcgggcgcctgtagtcccagctactcgggagactgaggccgaatggcgtgaacccgggaggcggagcttgcagtgagccgagatcacaccactgcactccagcctgggcgacagagcgagactctgtctcaaaaataaataaataaa

SEQ ID NO: 14095 - DNA, 201 bp, Homo sapiens
  source 1..201: mol_type = unassigned DNA
acacggtgaaaccccgtctctactaaagtacaaaaaattagccgggcatagtggcacaggcctttagccccagctacttgggaggctgaggtaggagaatcgcttgaacccgggaggcggagggtgcagtgagccactgcacgccagcctgggcaacagagccagactccgtctcaaaaaaaaaaaaaaaaaagaaagaaa

SEQ ID NO: 14096 - DNA, 201 bp, Homo sapiens
  source 1..201: mol_type = unassigned DNA
gccgaggtgggcgaatcacctgaggtcaggagttcaagaccagcctggtcaacatggtgaaaccccatctctactaaaaatacaaaaattaaccgggcatcgtggtgcgtgcctgtaatcccagctactcgggagactgaggcaggagaattgcttgaaccctgccggcagaggttgcaatgagctgagattgcaccacgg

SEQ ID NO: 14097 - DNA, 201 bp, Homo sapiens
  source 1..201: mol_type = unassigned DNA
ttctggaggtcatatttggacaggagccggttcttaacctcagccaagagtccacagaggggcctttgtttaactgcatggagctcatggctgacaggcgcggcggcaggacgggacgggaccggacgggctgtgtacctgtctttataccagtaccatactgttctgattactctagcttgtaagatgtttgaaacccac

SEQ ID NO: 14098 - DNA, 201 bp, Homo sapiens
  source 1..201: mol_type = unassigned DNA
aaaaccacaacaaagcctctgttcaaccacagattctgacccattggccaggcaggctgtttggcctctgatttgcacctagagggtccccggatcctggcgctgcgtgggtcagtgtctcgggagccggggaccggcactggccgtgctcggttgctgagtgtgcctcactaactatcattccgttcttccaggtcaatg

SEQ ID NO: 14099 - DNA, 201 bp, Homo sapiens
  source 1..201: mol_type = unassigned DNA
gaggccctctccatccaggtaaagaagaaagaaggatggctccaggagttcacataacatggccaaaggccgggcagcgtgcagcagaatgcaagatgagcggccaggttatagggcgagatcatgaaggattcttccccggccccaaatgttctttaagagtgtcctctcaccatccctcctctcatcccccaagaatag

SEQ ID NO: 14100 - DNA, 201 bp, Homo sapiens
  source 1..201: mol_type = unassigned DNA
ctcccaagtagctgggactacaggcgcccgccaccacgcccggctaatttttaatatttttagtagagacggggtttcactgtgttagccaggatggtctcgatctcctgacctcgtgatccgcccgcctcggcctcccaaagtgctgggattacaggcttgagccactgcgcccggccttcagttttcatatctgttaaa

SEQ ID NO: 14101 - DNA, 201 bp, Homo sapiens
  source 1..201: mol_type = unassigned DNA
ttaacacaaaaattagttgttttagccgggcgcggtggctcaagcctgtaatcccagcactttgggaggccgaggcgggcggatcacgaggtcaggagatcgagaccatcctggctaacacggtgaaaccccgtctctactaaaaacacacaaaaaatgagccgggcgcggtggcaggcgcctgtagtcccagctattcag

SEQ ID NO: 14102 - DNA, 201 bp, Homo sapiens
  source 1..201: mol_type = unassigned DNA
taaatcttgctgctgttcactctatgggtccacactgcctttatgagctgtaacactcaccgcaaaggtctgcaggttcactcctgagccggcaagaccacgaacccaccagaagaaactccgaacacatccgaacatcagaaggaacaaactccggacacgccacctttaagaactgtaacactcaccgcaagggtccgt

SEQ ID NO: 14103 - DNA, 201 bp, Homo sapiens
  source 1..201: mol_type = unassigned DNA
tcctgcctcagccttcccagtagctgggactacaggcgcccgccaccgcgcccggctaattttttgtatttttaatagaaacggggtttcaccgtggtctcgatctcctgacctcgtgatccgccgcccacctcggcctcccaaagtgctgggattacaggcgtgagccaccgcgcccggcctccttctttatttttaata

SEQ ID NO: 14104 - DNA, 201 bp, Homo sapiens
  source 1..201: mol_type = unassigned DNA
ggggtttcaccgtgttagccaggatggtctcgatctcctgaccttgtaatacgcccgcctcggccccccaaaatgctgggattacaggcgtgagccaccgcgcccagccggtttcacaggtatttatgtatatcaatagtttttttttgagacggagtctcgctctattcccaggctggagtgcaatggcgctgtcttgac

SEQ ID NO: 14105 - DNA, 235 bp, Homo sapiens
  source 1..235: mol_type = unassigned DNA
ccaattttccaggtgccgtctgtcacccctttctttgactaggaaagggaactccctgaccccttgtgcttccggagtgaggcaatgcctcgccctgcttcggctcacgcagggtgcgcgcacccactgacctgcgcccactgtctggcactccctagtgagatgaacccggtacctcagatggaaatgcagaaatcacccatcttctgcgtcgctctctctgggagctgtagac

SEQ ID NO: 14106 - DNA, 201 bp, Homo sapiens
  source 1..201: mol_type = unassigned DNA
ggtagataaagatacatgattagggccggccgcggtgactcatgcctgtaatcccagcactttgggaggccaaggcgaacggatcacgaagtcaggagatcgagaccatcctggctaacatggtgaaaccctgtctctactaaaaatacaaaaaattagccgagcgtggtggtgggcgcctgtagcgccagctactcgggg

SEQ ID NO: 14107 - DNA, 201 bp, Homo sapiens
  source 1..201: mol_type = unassigned DNA
caggtgatttctgcatttccatctgaggtaccgggttcatctcactagggagtgccagacagtgggcgcgggtcagtgggtgcgtgcaccatgcgcaagccgaagcagggcgaggcattgcctcacttgggaagcgcaaggggacagggagttccctttccgagtcaaaaaaaggggtgacagacgcacctggataatcag

SEQ ID NO: 14108 - DNA, 201 bp, Homo sapiens
  source 1..201: mol_type = unassigned DNA
agagacagaagctgctggagggcgagaggaacgcatcagtggaagaagacagaagcggctggtcacggagagcatgtcagcagaagaacacacctacagacgccggctcgcccgcgggctccccggcaggccatcgaccggtgggacgaggtggagtttgtcctgggcagtaggaggacagcccgggcacccagcggccca

SEQ ID NO: 14109 - DNA, 201 bp, Homo sapiens
  source 1..201: mol_type = unassigned DNA
cctacagaggcaggcaggcctccttgagctgtggtgggctccacccagttcgagcttcccggctgctttgtttacctaagcgagcctgggcaatggcgggcgcccctcccccagcctcgctgctgccttgcagtttgatctcagactgctgtgctagcaatcagcaagactcggtgggcataggaccctccgagccaggtg

SEQ ID NO: 14110 - DNA, 201 bp, Homo sapiens
  source 1..201: mol_type = unassigned DNA
gttccctttcctagtcaaagaaaggggtgacagaaggcacctggaaaatcgggtcactcccaccagaatactgcgcttttccgacgggcttaaaaaacggcgcacctggagattatatccggcacctggctcagagggtcctacgcccacagagtctcgctgattgctagcacagcagtctaagatcaaactgcaaggcgg

SEQ ID NO: 14111 - DNA, 201 bp, Homo sapiens
  source 1..201: mol_type = unassigned DNA
cgtccgtcacccctttctttgactcggaaagggaactccctgaccccttgtgcttcccaggtgaggcaatgcctcgccctgcttcggctcgcgcacggtgcgcgcacccactggcctgcgcccactgtctggcactcccttagtgagatgaacccggtacctcagatggaaatgcagaaatcacccgtcttctgcgtcgct

SEQ ID NO: 14112 - DNA, 201 bp, Homo sapiens
  source 1..201: mol_type = unassigned DNA
gcaagcaaggggcgtgtttcagctctgtttgtgttagagctctttcacctccaccatttggcaggttcagcgcccgggaacaatgacgtacgtggacaagcggagggtgagcaaggtgaagaggagctttactgagtaatagaacagctcagaggagactcgcggtgggtagctcctctctgcagccagggtgtcctgatg

SEQ ID NO: 14113 - DNA, 201 bp, Homo sapiens
  source 1..201: mol_type = unassigned DNA
ggcagatcacctgaggtcaggagttcgagaccagcctggccaacatggtgaaaccccgtctctactaaaaatacaaatatcagccgggcgtggtggtggtcgcctgtaatctcagctactcgggaggctgaggcaggagaattgctggatcccgggaggcagatgttgcagtgagccaagatcatgccattgcactccagc

SEQ ID NO: 14114 - DNA, 201 bp, Homo sapiens
  source 1..201: mol_type = unassigned DNA
ctgtagtatataccaccacccccctagtataccaccacccctcaacccggcccccaccgctaacaaagctgccggctgcaggaatgagagagtggtagaacgacacccccgtctcactccttgggactcctcagttgctggcggctccaagttttcaggagccacggtgttcccctcttccagatgctagtgccaacagtg

SEQ ID NO: 14115 - DNA, 201 bp, Homo sapiens
  source 1..201: mol_type = unassigned DNA
ggccagaagacggtgagtggaaagcccgggcgcgtggagagaccccaagaaggggctgttcagctgtgaatcctgcatttgccgttcgtgtttcatctggcggttttgaaaccaggttttcatctggacctctgtgagctgcatatccccggccagccacttccgctccagagggcccagatactggtagtgccggaagac

SEQ ID NO: 14116 - DNA, 207 bp, Homo sapiens
  source 1..207: mol_type = unassigned DNA
gctcctgtgacccctgcagccagcgaaccagcacatccttggggctgaagccacgtgccaggcacgtcagcgtcaccagctcgttcagggccagctcctccgacggcggcggcagcaggtggacctcgggccggaatgtgtttcctggagggtagagagccaggtcagggggctgggcaggggatgagagagcccctctgctctggt

SEQ ID NO: 14117 - DNA, 201 bp, Homo sapiens
  source 1..201: mol_type = unassigned DNA
cccatggggcagccagaagggagatggttttcccctggagttggggtgctcggcagccccggctctcccctgactgcccaggccaacctccgcctcctcccgctggtccacggcctactggcttccgggtgcctgtcagcgtgtccttctgctggggtgctcctatggatgaccagcgcttgtgtcttcttcccctgatgt

SEQ ID NO: 14118 - DNA, 201 bp, Homo sapiens
  source 1..201: mol_type = unassigned DNA
gaagacgggtgatttctgcatttccatctgaggtaccggtttcatctcactagggagtgccagacagtgggcgcaggtcagtgggtgcgtgcaccgtgcgcgaagcagggcgaggcactgcctcacttgggaagcgcaaggggtcagggagttccctttccgagtcaaagaaaggggtgacggacgcacctggaaaatcgg

SEQ ID NO: 14119 - DNA, 201 bp, Homo sapiens
  source 1..201: mol_type = unassigned DNA
ggggcgtggcctcctggagggaaccagtgtggagatgcccgtgtgcctggggcgtggcctcccggagggagtcagtgtggagatgcccgtgtgcctggggcgtggcctactagagggagtcagtgtggagatgcccgtgtgcctggggcgtggcctcctggagggaaccagtgcggagatgtcggtgtgcctggggcgtgg

SEQ ID NO: 14120 - DNA, 201 bp, Homo sapiens
  source 1..201: mol_type = unassigned DNA
gacgctcctcacctcccagatggggtggtggcggggcagagacactcctcagttcccagatggggtcgcggcctggcagaggtgctccccacatcccagacgatgggtggccgggcagagacgctcctcacttcctagacgggatgacggccaggaagaggcgctcctcacttcccagactgggcggccgggcagaggggc

SEQ ID NO: 14121 - DNA, 201 bp, Homo sapiens
  source 1..201: mol_type = unassigned DNA
gagcacagcgccggcgggctggcactgctgggggactcggcgcaccctccacagctgctgtcccgggtggtaagcccctcactgcccggggctggtggggcggccagctgctcggagtgtggggcccgccaaggccatgtccacccagaacttgctctggcctaccgcgagcagccccagttcccgccccgcgtctccctc

SEQ ID NO: 14122 - DNA, 201 bp, Homo sapiens
  source 1..201: mol_type = unassigned DNA
ctcctgagtagctggggctacaggtgcccaccaccacgcccggctaattttttgtattttcagtagagatggggtttcaccgtgttagccaggatggtctcgatctcctgacgttgtgatccaccgcctcggcctcccgaaatgctgggattacaggcctgagccaccgcacccggccatatttatttatttttaatcaga

SEQ ID NO: 14123 - DNA, 201 bp, Homo sapiens
  source 1..201: mol_type = unassigned DNA
ccccctcctcccccgactggccccgcccccactgccggccccgcccccactgccggcccgggccccacccacgccggagctgctccatttaaggagattgcgcagctggaaagctacacgtgtgagcctagaggcgggtcccggttgcagacttgccatggcctccgaagcttctgtgcgtctaggggtgccccctggccg

SEQ ID NO: 14124 - DNA, 201 bp, Homo sapiens
  source 1..201: mol_type = unassigned DNA
gttagttagttattttgagatggagtcttgctctgtcgttcaggctgtagtgcagaaccgctctcttggttcactgcaacctccaccttccgggttcaagcgataatcctgcctcagcctcccaagtagctggaattacagacgtgcactaccacgcccaactaatttttgtatttttagtagagatggggtttcgccata

SEQ ID NO: 14125 - DNA, 201 bp, Homo sapiens
  source 1..201: mol_type = unassigned DNA
gcggtctcctctgacccagatcgtcttcaaatatcgaacgctgaattgggccgggcgcggtggctcccacctgtcatcccagcactttgggaggccgaggcgggcggattatgaggtcaggagatcgagaccatcctggctaacacggtgaaaccccgtctctactaaaaatacaaaaaaaaaaaattagccgggcgtgat

SEQ ID NO: 14126 - DNA, 201 bp, Homo sapiens
  source 1..201: mol_type = unassigned DNA
ctacctttgtctctcaccctgggggtttcatgaccccggagcctccacgtcctggtacagagcctgcctctccgggactgggcttcggccgagcagacaccgcctagctgctctttgaccagcgttctctgctctgcgtctggctggcatcggcggcttgctgagtccagcctggcatctcgctggcatcggcggctcgct

SEQ ID NO: 14127 - DNA, 380 bp, Homo sapiens
  source 1..380: mol_type = unassigned DNA
ctctactaaaatacaaaaaattggctgggggtggtggcacgtgcctgtagtcccagttacacgggaggctgaagcaggggaattgcttgaacccgggaggcggagattgcagtgagccgagatcgtgccattgcactccaatggcactccagcctgatgacagagcgagactccgtctcaaaaataataataaataaataaacaaacaaacaaaaattagctgggcgtggtggcgtgtgcctgtagtcccagctactcgggagactgaggcaggagaatcgcgggaacccgggaggcggaggttgcagtgagccgagaccgcgccactgccctgcagcatggagacagagctagactccgtctaaaaaaaaaaaaaaaaa

SEQ ID NO: 14128 - DNA, 201 bp, Homo sapiens
  source 1..201: mol_type = unassigned DNA
aggcgggcggatcacgaggtcaggagatcgagaccatcctggctaatacggtgaaaccccgtctctactaaaaatacaaaaaattagctgggcgtggcggcgggcacctctagtcccagctacttgggaggctgaggcaggagaatggcgtgaacccgggaggcggagcttgcagtgagccgagatcgcgccattgcactc

SEQ ID NO: 14129 - DNA, 201 bp, Homo sapiens
  source 1..201: mol_type = unassigned DNA
aaaaactagcccggcgtggtggcacgcgcctgtaatcccaactacttgggaggctgcggcaggtgaatcacttgaagccgggaggtgaaggccgcagtaacgctgttccctgcattggatgaagtgctccccaccaaactctctcaccggagagggtgggatctgcgggctccctgggtggcttgatttcgacaccctgtg

SEQ ID NO: 14130 - DNA, 201 bp, Homo sapiens
  source 1..201: mol_type = unassigned DNA
acggcgaactgcggcgactgtgacgtgctcccccaccctctccccggtggacccttcctatttgccttcctcccaacccccaacaagcccccaccaccgacgacgtgagacgacgacggcatgggaccttccaccccgccagggccaatgaaccccacaccatgagctgcatgaggcatgagggagcccccaagggaggaa

SEQ ID NO: 14131 - DNA, 201 bp, Homo sapiens
  source 1..201: mol_type = unassigned DNA
gacgcagaagacgggtgatttctgcatttccatctgaggtaccgggttcatctcactagggagtgccagacagtgggcacaggtcagtgggtgcgcacaccgtgcgtgagccgaagcagggtgaggcattgcctcacttgggaagcgcaaggggtcagggagttccctttccgagtcaaaggggtgacggacgcacctgga

SEQ ID NO: 14132 - DNA, 201 bp, Homo sapiens
  source 1..201: mol_type = unassigned DNA
caaataattagggataaagagtatcatactgccgaacccattttatctttaattttttttttaaattttttacaaaaaattagccgggtgtggtggcgggcgcctgtagtctcagctactcagagactgaggcaggagaatggcgtgaacccgggaggaggagcttgcagtaagcggagatcgcgccactgcactacagcc

SEQ ID NO: 14133 - DNA, 201 bp, Homo sapiens
  source 1..201: mol_type = unassigned DNA
atctctgtgacccacaccctattcgtacactccctccccttttgaaaatccctaataaaaacttgctggttttacggctcaggggcatcacagaacctaccgacatgtgatgtctcccccggatgcccggctttaaaatttccctcttttgtactctgtccctttatttctcaacctggccgacgcttagggaaaacagaa

SEQ ID NO: 14134 - DNA, 201 bp, Homo sapiens
  source 1..201: mol_type = unassigned DNA
ctttggcgaactcttattgttataatcttaaaaacccggcccagggaggagcttattctccattttctatacaggcgacatatgtagaaacataatccgccgctgtgcctgtgcggccaggactccctctctacacgcaatgattcagctgaccagcccaagacatgctcggttttcacgcctgtttgtaggggcactgct

SEQ ID NO: 14135 - DNA, 201 bp, Homo sapiens
  source 1..201: mol_type = unassigned DNA
ttgggagtagaggtctttcggaaggcaccatctccagagcgtgtttctgagtaactctgaggatgggttccgggttatcactgtgtgttggaaacagcagcgcccaggctgccggaggaggctggtctccctggcaggtcctggctgtgtctagagttttgtgggtcctggagataaggctccggtttgaggcccctgggg

SEQ ID NO: 14136 - DNA, 201 bp, Homo sapiens
  source 1..201: mol_type = unassigned DNA
gcctgagcaggacaaggaccctagagtccaagagaatcctgatgatcagagaagggtccccgaggtcaccggggatgcacggtctgcatttcggcccctgcgggacaatggaggcctctctctccctttgtgcccgggcccgggcctctgcagacagacctccatacccagaggtgagaaatcagatataaccagacatcc

SEQ ID NO: 14137 - DNA, 201 bp, Homo sapiens
  source 1..201: mol_type = unassigned DNA
tcacatgctaggtcacaaaacaagtcttcagaaatttaagaagattgaaatcatatcaaccatctcttaaaaaaaataggtggccgggcgcggtggctcacgcctgtaatcccagcactttgggaggccgagacgggcggatcacgaggtcaggagatcgagaccatcctggctaacacggtgaaaccccgtctctactaa

SEQ ID NO: 14138 - DNA, 568 bp, Homo sapiens
  source 1..568: mol_type = unassigned DNA
ttagtatacagacacaaaaatgagaggtgacagcgtgctggcagccctcacagccctcgctccctctcggcacctcctcggccttggcgcccactctggccgcgtttgaggagcccttcagcccgtcgctgcactgtgggagcccctttctgggctggacaaggctggagccggctccctcagcttgcgggtaggtgtggagagagaggcgtgggcgggaaccgtggctgcaggctgcgcttgcgggccagctcgagttccgggtgggcgtgggcttggcaagccccgcactcggagcggccagccggcccgggcagtgaggagcttagcacctgggccagcagctgctgtgctcgacttctcgctgggccttagctgcctccccgccgggcagggctcgggacctgcagccctccatgcctgagcctccacccccgccgtgcgctcctgtgcagcccaagcctccccgacgagcgccaacccctgttccacggcgcccagtcccatcgactgcccaagggctgaggagtgcgggcacacggcgccggactggcaggcagctccacct

SEQ ID NO: 14139 - DNA, 201 bp, Homo sapiens
  source 1..201: mol_type = unassigned DNA
tctactaaaaatacaaaaaattagctgggcatcatggtgggtgcctgtagtcccagctactcgggaggctgaggcaggagaatggcgtgaacccgggaggcggagcttgcagtgagcggagatcgcgccgctgcactccagcctgggcgacagagcacgagtccgtctcaaaaaaagaaaaaaaagaaagaaaagaaaaga

SEQ ID NO: 14140 - DNA, 201 bp, Homo sapiens
  source 1..201: mol_type = unassigned DNA
gggctggccaaggccggagttggctccctctgcttgcggggaggtgtggagggagaggcgcaggtgggaaccagggctgtgtggggcgcttgtgggcaagcgtgagttccgggtgggagcgggctcggcaaacccattccagggtgccctgcccttcacaaagaaaactctccctggggctcccatgggcttctctgggat

SEQ ID NO: 14141 - DNA, 201 bp, Homo sapiens
  source 1..201: mol_type = unassigned DNA
tcccaagtagctgggactacaggcacccgccaccatgcctggctaattttttgtattttttagtacagatggggtttcatcgtgttaaccaggatggtctcgatctcctgacctcgtgatctgcccgccttggcctctcaaagtgccgggattacaggcgtgagccaccgtgcccagccatataccacattttctttatcc

SEQ ID NO: 14142 - DNA, 201 bp, Homo sapiens
  source 1..201: mol_type = unassigned DNA
aaccatggggtgaactttgttatggggacatgcacctggggggaaggttgtgatgggaggggcacccgggtcaaacacgggcggttgttagtgaagagcccgcaagacagagtaggagtcagggggaacagggagggaggggcatttttttctttcttttttgagacggagtctcactctgtcccccaggctggagtgcag

SEQ ID NO: 14143 - DNA, 201 bp, Homo sapiens
  source 1..201: mol_type = unassigned DNA
cacaggagcacaaaagggctggcggccttgcccgggtacactgttcgtcttctcacctactcgtgcacctcagtttatcatccctgagctgggcgtagcacgtggttcagagaacgggaagggacctacgagtgcctgacacacataatcactgctgctggtgattacccttatccatgagtggcgcatggatggggctag

SEQ ID NO: 14144 - DNA, 201 bp, Homo sapiens
  source 1..201: mol_type = unassigned DNA
caaaggtctgcttctgcatttaagcatctgagccctcaagagttagctcccgggctcctctggagcaaggttccgcccggtcccacgtacctgcctcgtccgccgtgatggtgagctcgttgctgggctcgctcttgccaatccggttcttggcgtacatgcggatgctgtaggtggaggaagggtggatatcaatgatgg

SEQ ID NO: 14145 - DNA, 201 bp, Homo sapiens
  source 1..201: mol_type = unassigned DNA
cttggctggccctgggacttgccctctggtggccaagcagtggtcatgaaagtccagccgctgtcacatccttgaggaaccggcgtacctccgcctacagcggcagctgggggcacccacgtggcccggggctgctctgacctggcagcgtatgggggctgctgcctgggcccctcagtgtgtcacttgcgcgcctcccgc

SEQ ID NO: 14146 - DNA, 201 bp, Homo sapiens
  source 1..201: mol_type = unassigned DNA
ctcggcgtcggcatccaccagcgtggttagcttggccgaagcctcgcggaagggcgggatcaggcgccgcatcgtcgtgtccagggactggaattggcgccgcccgtaggtcatgaggcccaccatggagcccagcgccgcaccctgcgagaggggtggatgtgggggtcgcagggaccccagacggcccgggaccgaccc

SEQ ID NO: 14147 - DNA, 201 bp, Homo sapiens
  source 1..201: mol_type = unassigned DNA
tggtcaccttgggagcctgctgctgatgaactgcagcatggccatctgggccgtccatcctgcatggtcacgctgtccggccactgctgcaggtacgtcccgccccgctcaatttcctggctggtggggtcatccgggtgtctgtacacgatcttctctgagagggtcagaggccggttcaatcatttgcaaacaatgtta

SEQ ID NO: 14148 - DNA, 201 bp, Homo sapiens
  source 1..201: mol_type = unassigned DNA
ccagcacacaggacacccatgcgtgtttatcatccggcacacgggagacccacgcgtgtttactgtcgggcacaggggagacccacgcgtgtttactgttcggcacacgagagacccacgcgtgtttaccgtttggcacagggagacccacgcgtgtttactgtccggcacaggggagacccacgcgtgtttactgtccgg

SEQ ID NO: 14149 - DNA, 201 bp, Homo sapiens
  source 1..201: mol_type = unassigned DNA
aggggaacagcaatagaagctccacttatcaggtacctactgtgtgtcaagcattgtgccaagggcttcatagaataatagcataagaatctcggccgggcgcagtggctcactcctgtaatcccagcactttgggaggccgaggtgggtggatcacgaggtcaggagttagagagaccagcctagccaacatggtgaaac

SEQ ID NO: 14150 - DNA, 201 bp, Homo sapiens
  source 1..201: mol_type = unassigned DNA
tgcacgcaccgtgcgcgagccgaagcagggcgaggcattgcctcactcgggaagcacgaggggtcagggagttcccattcctagtcaaagaaaggggtgacggacgcacctggaaaatcgggtcactcccacccgaatactgcgcttttccggcgggcttaaaaaacggcgcaccacgagactatatcccacacctggctc

SEQ ID NO: 14151 - DNA, 201 bp, Homo sapiens
  source 1..201: mol_type = unassigned DNA
gcccgccaccacgcccggagaattttttgtatttttagtggagacaggttttcaccatgttagccaggatggtctcgatctcctgacctcgtgatctgcccgcctcggcctcgcaaagtgctgggattataggcgtgaggcacagcgcccggtcccgactgctctatttaaagtaatgaaagcacagttggctccaaagga

SEQ ID NO: 14152 - DNA, 201 bp, Homo sapiens
  source 1..201: mol_type = unassigned DNA
cctgcggtcagctggaccaggtggccggcagcgagacggaacaagtagaccaggctgagggtgaaggcgcaggcgatcagcagcatggacaagaggttgccgcctgccacctcctccatcgcctggcccagcacctacccacccgcctgtagcaagcccagcagcatcatcccggccgccgccgccatttcactctgtcgg

SEQ ID NO: 14153 - DNA, 201 bp, Homo sapiens
  source 1..201: mol_type = unassigned DNA
ccagactgctttttttttgagacagagtctcgctctgtcacccaggctagagtgcggaggcgcgatctcagctcactgcaagctccgcctcccgggttcacgccattctcctgcctcagctttgcgagtagctgggactacaggcgcctgccaccgcgccggctaatttttttggtatttttagtagagacagggtttcac

SEQ ID NO: 14154 - DNA, 201 bp, Homo sapiens
  source 1..201: mol_type = unassigned DNA
acagtctactaaaaatacaaaaaaaaaaaaaaaaaaatttgccgggtgtggtggtgtgtgcctgtaattccagccacttgggaggctgaggcaagagaatcgactgaacccgggaggcagagattgcagtgagcccagatcatgctactgcactccagcctggataagagtgagactccatctcaaaaacaaaaataaaaa

SEQ ID NO: 14155 - DNA, 201 bp, Homo sapiens
  source 1..201: mol_type = unassigned DNA
tgtttttttttgttttgagatggagtctcactctattgcccaggctggagtgcagtggtgccatcttggctcactgcaacctccacctcccgggttctagcgattctcctgcctcagcctcccaagtagctgggattgcaggtgctcacaaccacgcccggctaatttttgtgtttttagcagagtcggagtttcaccatg

SEQ ID NO: 14156 - DNA, 201 bp, Homo sapiens
  source 1..201: mol_type = unassigned DNA
tgcctgccaccaagcccagctaatttttgtatttttagtagagacggggtttcattgtgttggccaggctggtctcgaactcctgacctcgtgatccgcccgccttggcctcccaaagtgctaggattacaagtgtgagccaccgcgtccggcctttcaaatggtatttttgattttcctcttccagtccttaaagcaggt

SEQ ID NO: 14157 - DNA, 201 bp, Homo sapiens
  source 1..201: mol_type = unassigned DNA
gccaaggtgggcggatcacttgaggtcaggagttcgagaccagcctggccaacatggtgaaaccccatctctactaaaaatatggaaaaaattagccgggcggggctcgagcctgtaatcccagctacttgggagctgaggcgcgagaatcgcttgaagccgggagggggaggttgcaggagcagaggttgtgccactgca

SEQ ID NO: 14158 - DNA, 201 bp, Homo sapiens
  source 1..201: mol_type = unassigned DNA
ggtctgtatggtgcgtgattatcctcagtggaagtttcaacatgggtgtggctcagctttttagggtcccccaaggcagaggtggcccgggcccctgcagcgatctcacaacacacttcaactgcagacggtggagactgcgggctgtcctccggctcaagcggccctggggcccccgtcctgcgcggagccacccgtgtt

SEQ ID NO: 14159 - DNA, 201 bp, Homo sapiens
  source 1..201: mol_type = unassigned DNA
gcgttttgggttactgagagaagtgaaacactgcagatacggcagaggtgtttctcccctccctccgcccctagatgtggccttcacacgcaggctgatgcgctcccttcccatccacgcctgctcggttttgccacatatgccgctgtgctgccggccttgaatgtgtatgagcggctcgtgctggggtcagcggaggct

SEQ ID NO: 14160 - DNA, 234 bp, Homo sapiens
  source 1..234: mol_type = unassigned DNA
aggggctacactcatggatccccttctccttggcaggaagatgagtgattatatctccgctatcattgaactgagcgctctgtctgtccggcgccagtatcgcttgcaccactacctcgacttcatttactaccgctcggcggatgggcggaggttccggcaggcctgtgacatggtgcaccacttcaccactgaagtcatccaggaacggcggcgggcactgcgtcagcaggg

SEQ ID NO: 14161 - DNA, 201 bp, Homo sapiens
  source 1..201: mol_type = unassigned DNA
ggggtcccttgtctccagcatcgccagcccaggtgtgttcctcatggcgtgatgcgtctgtagacttggaaacatcacaggacccaggtacttcacggagcgctcgctctgtgtcagccccagctcagcgcctcccagacaccgtctgacttcccggaggcagtcatcgacattgcgcccactgcacagatgagaaagctg

SEQ ID NO: 14162 - DNA, 201 bp, Homo sapiens
  source 1..201: mol_type = unassigned DNA
tccctagtgagatgaacccggtacctcagatggaaatgcagaaatcacccgtcttctgcgtcgctcacgctgggagctgtagaccggagctgttcctattcggccatcttggctcctccctcctgttttttttttgagacagtgtttcttttcacttctgtcacccaggctgcagtgcagtggcgcggtctgtgctcactg

SEQ ID NO: 14163 - DNA, 201 bp, Homo sapiens
  source 1..201: mol_type = unassigned DNA
taattttattttgtttttgagacagagtctcgctctgtcgcccaggctggagtgcagtggcgcaatctcggctcactgcaagctccgcctcccgggttcacgccattcgcctgcctcagcctcctgaataactgggactacaggcgtccgccaccacgcccggctaaatttttgtatttttagtagagacggggtttcatc

SEQ ID NO: 14164 - DNA, 201 bp, Homo sapiens
  source 1..201: mol_type = unassigned DNA
atccctagggctgcggatggcagaactaaaagagctaattagcaagtagaatcgccccttccggggcttcaaggtctgagcacccctcttggggtgccaccgcattcccttcggggtgacatgcctggtccagctgcaagccctgcctagaacctgcctgtgtaccggtgcttggaacagccagctggaccccacactcac

SEQ ID NO: 14165 - DNA, 201 bp, Homo sapiens
  source 1..201: mol_type = unassigned DNA
ggtccttgcagggagtttacatcagtagctcctcaccttgaggagacacgcgggccttcctcccgaagcccgtttaggaggcagatggagcgactcgactcggaggacaggagggtgttcaggggccctggcgccacagttcccacaggatgaccttggagcgttcctggatttcgagctgccctggctaaggagccgcac

SEQ ID NO: 14166 - DNA, 201 bp, Homo sapiens
  source 1..201: mol_type = unassigned DNA
cacacacaggcgtggacactcacatggctcccggcagtgctgcaggaggtcagcacagagacgtgctgaggagcctgagatgctcgctcctctgggccatcgcgtgtaaaggctgccctcgctgtggactctcacatgtgtgacatacatgaacaggcgaaacggacacgcacggcccccacacacgtgagctgggtcccc

SEQ ID NO: 14167 - DNA, 201 bp, Homo sapiens
  source 1..201: mol_type = unassigned DNA
cccctgtgaaggcaccaagcacggcagacgccctcacatcgccggggcccgtttccctgtggacgggaagtgggaacgtgacgtggacgtgacgtgggaacgtaacgtgacgtgacgtgacgtgacgtggcatggcgcgaggacagcgcggcgggagcggcgcctcagatccagcagggagggagacgaaaggcggatgga

SEQ ID NO: 14168 - DNA, 201 bp, Homo sapiens
  source 1..201: mol_type = unassigned DNA
gctgggcgtggtggcacgtgcctgcagtctcagctactcaggaggctgaggcaggagaatcccttgaacccgggacgcagaggttgcagtgagctgagatcgcgccactgcactccagcctggcaacagagtgagactccggctcaaaaaaaaaaaaaaagaaaaaaaaaaaaaaaagaaggagttgaggctttaagaact

SEQ ID NO: 14169 - DNA, 201 bp, Homo sapiens
  source 1..201: mol_type = unassigned DNA
ttgcactctgtgggtaggggacactcttctcagtggctggtgatgactgtgatcccacttgtcgagctctgtgggagtcccggcagtcctccgcaactgtcggctggttgttactgtctcagcgcctgccttctgattggttagcaaactacggtggtagacagaaaaaagatagccttcctttttagggctgtcctacaa

SEQ ID NO: 14170 - DNA, 201 bp, Homo sapiens
  source 1..201: mol_type = unassigned DNA
ccctgctggcgcaccctgctggcgcaccctgctggcgcaccctgctggcgcaccctgctggcgcaccctgctggcgcaccctgctggcgcaccctgctggcgcaagttgcgccttgggactgggcctgaaaagggaggagttattcatcttaagctttcaggcccggggagaatcttacagtaagccctctgggagtttga

SEQ ID NO: 14171 - DNA, 686 bp, Homo sapiens
  source 1..686: mol_type = unassigned DNA
gtggcacctgcaggctcccaggaccaggcagaggacccagcctccccaggactggggccccggcgctgcgctccaggggaggccgacgggggctgggaggcgcccagggcgggaatccagcgcacgggtgaggactttaaaaagcaaggggcaggatgagtcaacaaggttttgagcaggaaaactatgcgataggaagtgtatacattgccctatagcagaaagaccggggacgggaccagcctccaagcgacttcaaacccaaaaggaagcaacttccagactcttatgggcgtctcaatttgctctgggtgaaggaagacaggcaagaatttccaggtctgtgaggaccccacgtcccagggacagaagtgccagggacctgggaagtgcagacttaatacaaggcagagcaaaactcacgcgcctcggtaggacctttactccacgtgatccacttccgggtttgctgcgcaggacagaagccagtcccgggtggggcccccgaacatggtggcggggcctgggtgggacagaggcggggcgcgaggcggagagaccttgccctttagaacaggcaaagggcggggccgggaccagacctgtgcatctctccgcctcgcacccagcgcctctgtttttcgggtgtttggaggtgagagcggccaggaaggctgaggcatgat

SEQ ID NO: 14172 - DNA, 201 bp, Homo sapiens
  source 1..201: mol_type = unassigned DNA
gctagagtgcagtggtgcgatctcggctcactgcaagctccgcctcccgggttcacgccattctcctgcctcagcctccccagcagctgggacaggggcacgccgccacgcccggctagtttttgtatttttagtagagacggggtttcaccatattagccaggacggtctcgatctcctgacctcgtgatctgccagcct

SEQ ID NO: 14173 - DNA, 201 bp, Homo sapiens
  source 1..201: mol_type = unassigned DNA
gccagagaccctgtctctaaaagcaaaaaagaaaaaaaaagcccttttccaagttattacacactctgaataattaatattgaaaactgttggccgggcgcggtggctcacgcctgtaatcccagcactttgggaggccgaggcggggcggatcacgagatcagcagaacggcgtgaacccggaaggcggagcttgcagtg

SEQ ID NO: 14174 - DNA, 201 bp, Homo sapiens
  source 1..201: mol_type = unassigned DNA
ctgcatttccatctgaggtaccgggttcatctcactagggagtgccagacagtgggcgcaggtcagtgggtgcgtgcaccgtgtgcgagccgaagcagggcgaggcactgcctcacttgggaagcgcaaggggtcagggagttccctttctgagtcaaagaaaggggtgacggacgcaccttgaaaatcgggtcactccca

SEQ ID NO: 14175 - DNA, 201 bp, Homo sapiens
  source 1..201: mol_type = unassigned DNA
acgcacccactgacctgcgcccactgtctggcagtccctagtgagatgaacccggtacctcagttggaaatgcagaaatcaccatcttctgtgtcgctcacgctgggagctgtagaccggagctgttcctattcggccatgttggctcctcccccggatataaccattcttgtacttatttaattttcatttttatggaat

SEQ ID NO: 14176 - DNA, 201 bp, Homo sapiens
  source 1..201: mol_type = unassigned DNA
ttttcatgtgactactgcctgcctgtcagcgctagcctcttctgactctaaattacaagtggaagaaagcacgttagaaacccacagaactggcccggcgcggtggttcaggtctgtaatcccagcactttgggaggccgaggcaggcggaccacgaggtcaggagatcgagaccatcctggctaacagggtgaaaccccg

SEQ ID NO: 14177 - DNA, 201 bp, Homo sapiens
  source 1..201: mol_type = unassigned DNA
aagtcttttttttttttttttttttttttttttgagacggagtctcactctttcgcccaagctggactgcagtggcgctatcccggctcactgcaagctccgcctcttgggttcatgccattcttctgcctcagcctcccgagtagctgggattacaggcgcccaccaccacgcccggctaattttttgtatttttagtag

SEQ ID NO: 14178 - DNA, 201 bp, Homo sapiens
  source 1..201: mol_type = unassigned DNA
cgcctggtgcatgctgtggagggcgtgggcaatggcgtacaccgcatcaatcacaaactgcaccttgccctcctgctcgtaggtggagtcccggccgatgcgttcctcgcctgtcctagggatgcccagagaaagtgtgcccggcccccatgcaccgaacccggcctcccgccttccccctccccaccctcaccaccctcc

SEQ ID NO: 14179 - DNA, 201 bp, Homo sapiens
  source 1..201: mol_type = unassigned DNA
gactttagggggtcccaccctagcggctctctttacccttcctgtagagaaaaaagagtgccggcgggaccaccgcccaccgtgtgctcaggaggcgccccgcaacatggtgcaccccaatgtgatctgcgatggctgcaatgggcctgtggtaggaacccgctacaagtgcagcgtctgcccagactacgacttgtgtag

SEQ ID NO: 14180 - DNA, 201 bp, Homo sapiens
  source 1..201: mol_type = unassigned DNA
ggcactttatttatttagagacagagtctcgctgcgacgcccaggttggagtgcatggcgcaatcttggctcactgcaggctccgcctcccgggttccagcgattctcctgcctcagcctcccgagtagctggggttacagttatgtgccaccacgccgggctaatttttgtatttttagtagagacagggtttccccata

SEQ ID NO: 14181 - DNA, 201 bp, Homo sapiens
  source 1..201: mol_type = unassigned DNA
ccaccatgcccaactaattttttctatttgtagtagagacagggtttcactgtgttagccaggatggtctcgatctcctgaccttgtgatccgcgtgtctcggcctcccaaagtgctgggattacaggcgtgagctaccgcgcccggcttgtaaatattttctgcgcttcagtgggccatgtcttcactttgttgattgct

SEQ ID NO: 14182 - DNA, 227 bp, Homo sapiens
  source 1..227: mol_type = unassigned DNA
tcagcctcctgagtagctggaactacaggtgcccgccaccacgcccggcttattttctgtatttttagtagagacggggtttcaccatgttagccaggatcgtcttgatctcctgacctcgtgatccgccggcctcggcctcccaaagtgctgggattacaggcgtgagccaccacgcccagccctagaaattgaaatgcatattattaagtgaaagaagccaatct

SEQ ID NO: 14183 - DNA, 201 bp, Homo sapiens
  source 1..201: mol_type = unassigned DNA
ccctcccccagccttgctgccaccttgcagtttgatctcagactgctgtgctagcaatcagcgagactccgagccaggtgtgggatataatctcgtggtgcgccgttttttaagccggtcggaaaagcgcaatattcgggtgggagtgacccgattttccaggtgcgtccgtcacccctttctttgactcggaaagggaac

SEQ ID NO: 14184 - DNA, 201 bp, Homo sapiens
  source 1..201: mol_type = unassigned DNA
aggtgcgtctgtcacccctttctttgactcggaaagggaactccctgaccccttgcgcttcccaagtgaggcaatgcctctccctgcttcggctcgcgcacggtgcatgcccccactgacctgcgcccactgtctggctctcccaagtgagatgaacccggtacctcagatggaaatgcagaaatcacccgtcttctgcgt

SEQ ID NO: 14185 - DNA, 201 bp, Homo sapiens
  source 1..201: mol_type = unassigned DNA
tgcctttttgtttcagtgctcatactgtaaaaaagtgtcctttccaccgggcgcggtggctcacgcctgtaatcccagcactttgggaggcagaggcgggcggatcacgaggtcaggagatcgaaaccatcctggctaacacggtgaaaccccgtctgtactgtgaatacaaaaaattagccgggcgtggtggcgggtgcc

SEQ ID NO: 14186 - DNA, 201 bp, Homo sapiens
  source 1..201: mol_type = unassigned DNA
gccgggcgtggtggcgggcacctgtagtcccagctactcgggaggctgaggcaggagaatggggtgaacccgggaggcggagcttgcagtgagccgagatcgcgccactgcactccagcctgggtgacagagcgagactccatttcaaaaaaaaacaatactaggattgaagtttgcttcctaacttccagtgacacggtt

SEQ ID NO: 14187 - DNA, 201 bp, Homo sapiens
  source 1..201: mol_type = unassigned DNA
tgaacaagaaagggccattacattttattctgaaatggcccctggagaaagaatggaagcaaattgcacaagtgggcgtccatctccttccacccggccacggtcaccgtggtgctcggccaggctcctggtgacgtgaggcaaatctctccgctggcaaaccagcccacacactccctccattgcagacggtcacccaga

SEQ ID NO: 14188 - DNA, 201 bp, Homo sapiens
  source 1..201: mol_type = unassigned DNA
ctaagcaccttcctgtgacccgctcagaggaacccctggcagtggggatggcgtcacccccatttgagagatgaggagactgaggctcagaggggggacgcggcttgcccgagtcacactgattgagaggggcagacctggattcgtctgcagcccaagctcttagagaccccggtgtggcctgccgggcagccagcttgt

SEQ ID NO: 14189 - DNA, 201 bp, Homo sapiens
  source 1..201: mol_type = unassigned DNA
gtgtgattttggaggggcaagaaccaccccggcagctatgggggagcccacgagtgcctgacaagaggtcacgtcttcctgggacctcccagaaagccagcggaggggccggggatagtagctgctctgggctcaaggtgagcagtattgccgtccctgaggatggcgtgcaggtgaaggtactgccgatcccaggctggg

SEQ ID NO: 14190 - DNA, 201 bp, Homo sapiens
  source 1..201: mol_type = unassigned DNA
cccggatacccaggtcatctccgaatctcaaggtccttaatcgtagtcacacgtacagaggcttctttgccatgtggggtaatacggtcacagggtaagacggtcacgggtctcagacatctttgggccattatcctgtctaccgcaggtggacacagccatggaatggaagcaacttttctgattacctacggtagcttt

SEQ ID NO: 14191 - DNA, 201 bp, Homo sapiens
  source 1..201: mol_type = unassigned DNA
gattccttcgagcctgccgggagacagccacgccaatggtcacaacgggcacagcgctcaggaacgcagcaactcagccagccgccagctctttccctggcgcgggcaccacccaacgcgcccatctggggtccagatgcgataaactggccgagggactctgggccctggctgggacgagcgcagcaaacctgccgccac

SEQ ID NO: 14192 - DNA, 201 bp, Homo sapiens
  source 1..201: mol_type = unassigned DNA
ccttgaatagcagcaggtagtagagccccagggagagcaggtccccgtggtgcagcaccacggtcctgtgccccacctcggagaagttgacggagatgtgcgccccggggatgggctccaggaccagcctccccgcggcctggccgctgtccgggagcggttgccggcggatggtgcagtgtagaggcaggatgtcggggg

SEQ ID NO: 14193 - DNA, 201 bp, Homo sapiens
  source 1..201: mol_type = unassigned DNA
acagggtttcaccctgttagccaggatggtctcgatctcctgacctcgtgatccgccagcctcggcctcccaaagtgctgggattacaggcgtgagccaccgcattgggccggcagttatctttcttaagtagcagttctatttctcagtataaattaatgctgcagttcctaaaccatttgctgaagtgcctctgaaccc

SEQ ID NO: 14194 - DNA, 201 bp, Homo sapiens
  source 1..201: mol_type = unassigned DNA
ttttttttttttttttgagacagaattttgctctgttgcccaggctggagcacagtggtgcgatatcagctcactgcaaactccacctcccgggttcaagcgattttcctgcctcagcctcctgagtatctgggattacagggagtgcctccacacctggctaattttttgtatttttagtagagacagggtttcaccgtg

SEQ ID NO: 14195 - DNA, 201 bp, Homo sapiens
  source 1..201: mol_type = unassigned DNA
aacagctgggcgcggtggctcacacctgtaatcccagcactttgggaggctgaggcgggtagatcacgaggtcaggaaatcgagaccatcctggctagcacggtgaaaccccgtctccactaaaaatacaaaaaaaattagccgggcgttgtggcggacgcctgtagtcccagctactcctaaggctgaggcaggagaatg

SEQ ID NO: 14196 - DNA, 201 bp, Homo sapiens
  source 1..201: mol_type = unassigned DNA
ttgactcggaaagggaactccctgaccccttgcgcttcccaagtgaggcaatgccttgccctgctttggctggcgcacggtgcgcgcacccactgacctgcgcccactgtctggccctccctagtgagatgaacccggtacctcagatggaaatgcagaaatcacccgtcttctgcatcgctcacgctgggagctgtagac

SEQ ID NO: 14197 - DNA, 201 bp, Homo sapiens
  source 1..201: mol_type = unassigned DNA
tttttattttgttttttagacagaatctcgttgtgtcacccaggctggagtgcagtggcgtgatcttggctcactgcaacttctgcctcccgggttcacgcgattcttctgcttcagcctcccaagcagctgggattgcaggtgtgcaccaccatgcccatactaagtctttgtatttttagtagagatggggttttgcca

SEQ ID NO: 14198 - DNA, 201 bp, Homo sapiens
  source 1..201: mol_type = unassigned DNA
cagtgaaaccccgtctctactaaaaatacaaaaaattagcccggcgtggtgaagggcacctgtagtcgcagctactcaggaggctgaggcaggagaatggcgtgaacccgggaggtggagcttgcagtgaaccgagatcacgctactgcactccagcctgggcgacagagtgagactctgcctcaaagaaatagaagattt

SEQ ID NO: 14199 - DNA, 201 bp, Homo sapiens
  source 1..201: mol_type = unassigned DNA
ctctgtgaaaaataaaaaaaataagccgggcgcggtggctcacgcctgtaatcccagcactttgggaggccgaagcaggcagatcacgaggtcaggagatcgagaccatcctggctaacgcggtgaaaccccgtctctactaaaaatacaaaatattagccgggcgtagtggcgggcgcctgtagtcccagctactcggga

SEQ ID NO: 14200 - DNA, 201 bp, Homo sapiens
  source 1..201: mol_type = unassigned DNA
gagctaaagtgatacgtctgcctgggcctcccaaagtgctggaattacagatctgagccaccgggcccagcccaattactttcttcagtctgagtatgagcgccggaagaaaagctcctacctgcatctattttttttagacacagggtctccctctgtcacccaggctggagagcagtggcgcaatctccgctcggctca

SEQ ID NO: 14201 - DNA, 201 bp, Homo sapiens
  source 1..201: mol_type = unassigned DNA
ggagcatgaggcaggagagtcacttgaacccgggaggcagaggttgctgtgagccgagatcatacctctttactccagcctgagtggcagagcaagactccgtctcaaaaaaaaaaaaaaaaagttgggggaaggagagaaaaatagagagcccagtggggcaaccccccacccagcccttgccacctgccactgctccag

SEQ ID NO: 14202 - DNA, 201 bp, Homo sapiens
  source 1..201: mol_type = unassigned DNA
atatctggtttctgggatttgcacacctttgtccctcttgggtggaaagacggcttccctgaccagggctcccctgtgttccagagggcacgttccctttcgtaagtgtgagtcgcacaccagtgagcatgtgtctccacttccagggacaccggccactaggcttggggttagatggtaggactctcgtccctcccttca

SEQ ID NO: 14203 - DNA, 201 bp, Homo sapiens
  source 1..201: mol_type = unassigned DNA
ctacaggcgcccgccaccacgcccggctaattttttgtgttttgtttagtagagacggggtttcaccgtattagccaggatggtctcgatctgctgacctcgtgatccgcccgcctcggcctcccaaagtgctgggattacaggcgtgagccaccttgcgcccggcctctttatttttatatctcaaatcagagatgattt

SEQ ID NO: 14204 - DNA, 217 bp, Homo sapiens
  source 1..217: mol_type = unassigned DNA
tacaggcgccccccaccacgcccggctaattttttgtatttttagtagagacggggcttcaccgcgttagccaggatggtctcgatctcctgaccgagaccgcgccttcctgaccgcgcccggccgaccctcctcttttttctatttgttttttctctttttatcattatcaaaagcccattgtcccatactttctccttcctaatttcattcaaaa

SEQ ID NO: 14205 - DNA, 217 bp, Homo sapiens
  source 1..217: mol_type = unassigned DNA
ggtctacagctcccagcttgagcgacgcagaagacgggtgatttctgcatttccatctgaggtaccgggttcatctcactagggagtgccagacagtgggcgcaggtcagtgagtgcgtgcaccgtgcgcgagccgaagcagggcgaggcactgcctcacttgggaagggcaaggggtcagggagttccctttcccagtcaaagaaaggggtgacgg

SEQ ID NO: 14206 - DNA, 201 bp, Homo sapiens
  source 1..201: mol_type = unassigned DNA
gcccgccaccacgcccggctaaatttttgtatttttagtagagatggggtttcaccttgttaaccaggatggtgtcgatttcctgacctcgtgatccgcccgccttggcctcccaaagtgccgggattacaggcgtgagccactgcgcccggcctggaaattgttttttatgtagttgatccattttaactcccaccagca

SEQ ID NO: 14207 - DNA, 201 bp, Homo sapiens
  source 1..201: mol_type = unassigned DNA
tatatgaccctgaataagtcctgaattatccacatgtgactttccggtctcatatgaggcagaacagcacggtgtggaccgggaaccctgacgtgggagccgaaagatggggaggctgtgggcacggcccccggagccccgggactgagacatgcaggcacctcagacgggtttgctgccacaataagtgggaaatctcca

SEQ ID NO: 14208 - DNA, 201 bp, Homo sapiens
  source 1..201: mol_type = unassigned DNA
cccagagaagacccggcagcccctccagccctcggcctctgtccccgcctccttccctcctgtcctcaggcctcctctctgcagcctcccagtctcccaccgcgtcctgcgctcctggttttctcctcttctagtgtcttccccacctggcgtcgcccggccgcaaccctggccctcctggggaagaggttcggaccctac

SEQ ID NO: 14209 - DNA, 201 bp, Homo sapiens
  source 1..201: mol_type = unassigned DNA
tgtttccacattggaaaaattcaaacacctttaagagtctgactatcggccgggcgcggtggcttaacgcctgtaatcccagcactttgggaggccgaggcggccggatcacaaggtcaggagatcgtgaccatcctggctaacacggtgaaaccccgactctactaaaaaaatacaaaaaaattagccgggcgcggtggc

SEQ ID NO: 14210 - DNA, 201 bp, Homo sapiens
  source 1..201: mol_type = unassigned DNA
gatttggttgtttagaagcgtgtgccactccggatcgagccaagatggccgaataggaacagctccggtctacagctcccactgtgagcgacgcagaagacgggtgatttctgtatttccatctgaggtaccgggttcatctcactagggagtgccagacagtgggtgcaggtcagtgggtgcgcgcaccgtgcgtgagct

SEQ ID NO: 14211 - DNA, 201 bp, Homo sapiens
  source 1..201: mol_type = unassigned DNA
cttcggccgggcgccgtggctcacgcctgtaatcccagtgagaggtgatagcatgctggcagccctcgcagccctccctcaccagcgcgacttccgggtgcgcgtgggctgggctggcccgcacttggagcggccagcagccccgggcagtgaggggcttagcacctgggccagcagctgctgtgctcgacttctcgccag

SEQ ID NO: 14212 - DNA, 201 bp, Homo sapiens
  source 1..201: mol_type = unassigned DNA
tgcggccgggcgcggtggctcactcctgcaatcccagaactttgggaggccgaggcgggcggatcacgagatcagcagattgagaccatcctggctaacacggtgaaaccccgtctctattaaaaatacagaaaaagtagccgggcgtggtggcgggcacctgtagtcccagctacaggctgaggcagaagaatggcgtga

SEQ ID NO: 14213 - DNA, 201 bp, Homo sapiens
  source 1..201: mol_type = unassigned DNA
cctcggcctcccaaagtgctggggttacaggcgtgagccaccgcgcccggtcagccgtccctactaaaaatacaaaaaattagcctggcgtggtggcgggcgcctgtagtcccagctactccggaggctgaggcaggggaattgcttgaacccatgaggcggaggttctaagccgaggtcgtgccactgcactccagtctg

SEQ ID NO: 14214 - DNA, 201 bp, Homo sapiens
  source 1..201: mol_type = unassigned DNA
ggctggagtgcagtggcgtgatctcggctcgctacaaccttcacctcccagcagcctgccttggcctcccaaagtgccgagattgcagcctctgcccggccgccaccccgtctgagaagtgaggagcgtctctgcctggccgccatcccatctaggaagtgaggagcgcctcttcccggccgctatcccatctgggaagtg

SEQ ID NO: 14215 - DNA, 201 bp, Homo sapiens
  source 1..201: mol_type = unassigned DNA
gccttagctgccttcccgcggggcagggctcgggacctgcagcccgccatgcctgagcctcccaccccttccgtgggctcctgtgcggcccgagcctccccgacgagcgccaccccctgctccacggcacccagtcccattgaccacccaagggctgaggagtgcgggcgcacagtaccgggactggcaggcagctccatc

SEQ ID NO: 14216 - DNA, 286 bp, Homo sapiens
  source 1..286: mol_type = unassigned DNA
gaagacgggtgatttctgcatttccatctgaggtaccgggttcatctcactagggagtgccagacagtgggcgcaggccagtgggtgcgcgcaccgtgcgcgagccgaagcagggcgaggcattgcctcacctgggaagcgcaaggggtcagagagttccctttccgagtcaaataaatgggtgacggacgcacctggaaaatcgggtcactcccacccgattattgcgcttttcagaccggcttaaaaaacggtgcaccacgagactatatcccacacctggctc

SEQ ID NO: 14217 - DNA, 201 bp, Homo sapiens
  source 1..201: mol_type = unassigned DNA
gcctcagctgcctccctgcggggcagggcttgggacctgcagcctgccatgtgtgagcctccccccactgccctaggctcctgtgcagcaggagcctccccgacgagcaccgccccctgctccatggcacccggtcccatcgactgtggaacggctgaggagcgtgggcacaaggcatgggactggcaggcagctttgcct

SEQ ID NO: 14218 - DNA, 201 bp, Homo sapiens
  source 1..201: mol_type = unassigned DNA
ggagtgcaatggcaccatctcggctcactgcaacctccgcctcccgggttcaggcgattctcttgcctcagcctcccgagtatctgggattacaggcgcgcgcctccacgcccaactaatttttgtatttttagtagagacggagtttcaccatgttggccaggctcgtctcgaacccctgacctcgtgatccacccgcct

SEQ ID NO: 14219 - DNA, 201 bp, Homo sapiens
  source 1..201: mol_type = unassigned DNA
cctccgtcaccccttcctttgactcggaaagggaactccctgaccccttgcgcttcccgagtgaggcaatgcctcgccctgcttcggctcgcgcacattgcgcacacccactgacctgcgcccactgtctggcactccctagtgagatgaacccggtacctcagatggaaatgcagaaatcacccgtcttctgcgtcgctc

SEQ ID NO: 14220 - DNA, 201 bp, Homo sapiens
  source 1..201: mol_type = unassigned DNA
gacgcagaagacgggtgatttctgcatttccatctgaggtaccgggttcatctcactagggagtgccagacagtgggcgcaggtccgtgggtgcatgcaccgtgtgcgagctgaagcagggcgaggcattgcctcactccggaagcgcagggggtcagggagttccctttcctagtcaaagaaaggggtgacagacggcac

SEQ ID NO: 14221 - DNA, 201 bp, Homo sapiens
  source 1..201: mol_type = unassigned DNA
cccagctaattttttttatatttttaatagagacagggtttcaccatgttggccaggatagtcttgatctcttgacctcgtgatccgcccgcctcggccccgcaaagtgctgggattacaggcgtgagccaccgcacccggccggaagtatacattttaacagctctacatagtagctgctgtcagaattcaaatgaagat

SEQ ID NO: 14222 - DNA, 201 bp, Homo sapiens
  source 1..201: mol_type = unassigned DNA
cagaagacgggtgatttctgcatttccatctgaggtaccgggttcatctcactagggagtgccagacagtgggcgcaggccagtgtgtgtgcgcaccgtgcgcgagccgaagcagggcgaggcattgcctcacctgggaagcgcaaggggtcagggagttccctttctgagtcagggaaaggggtgacggatggcacctgg

SEQ ID NO: 14223 - DNA, 201 bp, Homo sapiens
  source 1..201: mol_type = unassigned DNA
ctggcagggccggccggctgctcccagtgcggggcctgccaagcccacgcccacccggaactccagctggcccgcaagcaccatgcacagcctgggttcccgctcacgcctctccatccacacctccctgcaagctgagggagcgggctctggccttggccagcccagaaaggggctctcacagtgcagcggtgggctgaa

SEQ ID NO: 14224 - DNA, 201 bp, Homo sapiens
  source 1..201: mol_type = unassigned DNA
cttgagattctcgcagccccggggcctgagctgaggggtcaccggcagtgccgtgggagtcaggctgccctcccggaagccaggctgctcctgagcagagcggaggctccatcgccctccggggggcacggtggcagtctccaggctgcactggggttggatgagctgggggtggagcacaaggggtcagtccctctcccc

SEQ ID NO: 14225 - DNA, 201 bp, Homo sapiens
  source 1..201: mol_type = unassigned DNA
aaacccctcgtctgcagggggcgggtggggaggtggaggaggggctgggccaaacgctgggggtgtgacccggggctgcgggctctcgggtctcagtcttcgggtctgccgagtgggcgagtggggtgcctcactccctgcggtctcttcccggtccccacagaacatggagaaggcgactctgccgtcggtgacgctcat

SEQ ID NO: 14226 - DNA, 201 bp, Homo sapiens
  source 1..201: mol_type = unassigned DNA
gggcgcctgtagtcccagctactcgggaggctgaggcaggagaatggcatgaacccgggaggcggagcttgcagtgagccgagatcgcgccactgcacttcggcctgggcgacagagcgagactccgtcaaaaaaaaaaaaaaaaagcagtcttgcaagatcaggtgtctggtagacaggcacactcagtaaagttacaac

SEQ ID NO: 14227 - DNA, 210 bp, Homo sapiens
  source 1..210: mol_type = unassigned DNA
ctactaaaaatacaaaaaaattagcctggcgcggtggcgggcgcctctagtcccagctgctcgggaggctgaggcaggagaatggcgtgaatccgggaggcggagcttgcggtgagccgagatcctgccacagcactccagcccgggcgacagagtgagacttcgtctcagaaaaaaaaaaaaaaaaaaaaaagaagtgggaacccagaa

SEQ ID NO: 14228 - DNA, 201 bp, Homo sapiens
  source 1..201: mol_type = unassigned DNA
ccccgggttcacgccattctctcgcctcagcctcccgagtagctgggactacaggcacccggctaattttttgtattttttatagagacggggttctcaccgtgttagccaggatggtcttgatctcctgacctcgtgatccgcctgcctgggcctcccaaagtgctgggattacaggcgtgagccaccgcgcccagcttg

SEQ ID NO: 14229 - DNA, 201 bp, Homo sapiens
  source 1..201: mol_type = unassigned DNA
gaccgttttctcgccattgtacccacacaacttgctctaaatgggcaatttattaagtatattttgtccctgttcccgccgcaggcccctgccggaccgtcgcccacaagctcccatagcccgtgagtcctctcagcctggcccggctcaccctgtggcgcccacgtctaccccgggccctttccgattcctctttaaccc

SEQ ID NO: 14230 - DNA, 201 bp, Homo sapiens
  source 1..201: mol_type = unassigned DNA
gtagtgcagtggcgcaatctcggctcactgcaagctccgcctcccgggttcacgccattctcctgcctcagcctccgggctagctgggactacaggcgcccgccactgtgccaggctaattttttgtatttttagtagagatggggtttcaccatattagccaggatggtctcgatctcctgacttcgtgacccacccgcc

SEQ ID NO: 14231 - DNA, 201 bp, Homo sapiens
  source 1..201: mol_type = unassigned DNA
tccgtgtttctccctttcgagccggcgggccacagacgtcggaagaaactcccgtatttgcagctggaactgcagcccacggcgccccggttttcctccccgccctgtccctctctggtcaaacaacatactaaagaggcgaggcaatgactgttggccagttctcaccggggaaaaacccactgttaggatggcatgaac

SEQ ID NO: 14232 - DNA, 201 bp, Homo sapiens
  source 1..201: mol_type = unassigned DNA
ggaacaaacattcctgttccacaaagacccagaattcactggatactgataaaatgtttactagaggccggcgcagtggctcatgcccataatcccggcgcggtggctcacacctgtaatcccgacgtggtggctcacacatgtaatcccagcacttcgcaaggccaggtggggggatcacttgagctcaggagttcatga

SEQ ID NO: 14233 - DNA, 201 bp, Homo sapiens
  source 1..201: mol_type = unassigned DNA
gtggtgcaattttggctcactgcaagctctgcctcccgggttcatgccattctcctgcctcaggctcccgagtagctgggactacaggtgcacaccaccacgcccggctaatttttttgtatttttagtaaagacggggtttcaccatgttagccaggatggtctcgatctcctgaccttgtgatccaccagcctcagcct

SEQ ID NO: 14234 - DNA, 201 bp, Homo sapiens
  source 1..201: mol_type = unassigned DNA
gtaaaccttctgcaaaatcctggccctccagaccccagctgggtcctcccctccaggcccccagtggcagctgtgccccttgtgtgcccacgtcggccagcgcaagccacacatggacccagtgcccactgcacccctgccagcctcagggtcccagcccgttgttccgggagacttcagtcctggcccaggcatctcctt

SEQ ID NO: 14235 - DNA, 201 bp, Homo sapiens
  source 1..201: mol_type = unassigned DNA
ttttaatttttttattaagatggagtcttgctctatcgcccaggctggagtgcagtggcgcgatcacggctcactacaacctccgcctcccgggctcaagcgattctcctgcctcagcctcccgagtagctgggattacaggcatgtgccaccatgcccaggtaattttagtacttttagttgagacggggtttcaccatg

SEQ ID NO: 14236 - DNA, 201 bp, Homo sapiens
  source 1..201: mol_type = unassigned DNA
ccccgccaggcgcggtggctcatgcctgtaatcccagcactttggaacgccgaggcaggcgaatcacgaggtcaagagatcgagactatccttgctaacacggtgaaaccccgtctctaccaaaaatacaaaaaattagccgggcgtgggggcgggcgcctgtagtcctagctgctcgggaggctgaggcaggagaatcgc

SEQ ID NO: 14237 - DNA, 201 bp, Homo sapiens
  source 1..201: mol_type = unassigned DNA
attattttctttttttttgagacggagtcttgctctgtcgcccacgctggggtgcagtggcacgatctcggctcactgcaagctccgcctcccgggttcacgccattctcctgtctcaacctctcgagtagctgggactacaggcacatgctaccacacccggctaatttttttgaatttttagtagagaggggtttcact

SEQ ID NO: 14238 - DNA, 201 bp, Homo sapiens
  source 1..201: mol_type = unassigned DNA
tccgcgaatccgggtggtgtccttttcttgtactattcagacgtgtttctaggaaggacgtgctgtcatgacccgccatggtggtcccggggatggtcagcggcgggatgatgggtgtgatgtggtcccggggatggtcagcggcaggatgatgggtgtgacgcatctgtgctacttgggattcaaattcatctatgatct

SEQ ID NO: 14239 - DNA, 201 bp, Homo sapiens
  source 1..201: mol_type = unassigned DNA
actgggtttcaccgtgttagccaggatggtctcgatttcctgaccttgtgatcagcccgcctcggcctcccaaagtgctggtattacaggcgtgagccaccgctcccggcaaagtcctttttcgatggtttcagtttgctggacaagccaggaacaaggccattggttgcaagggaggaggagctcttgtaggtggcagcg

SEQ ID NO: 14240 - DNA, 201 bp, Homo sapiens
  source 1..201: mol_type = unassigned DNA
ggtgactcaaatcgttcatgtggaacacacacacacacacacatatacacacacacgtgtcttagggacggacacacacaaacacgtgtcttaggggccccgtgtgaggagaggagattcacactactgacccagcaaccagggtcgaccccagagggctggagcacacactccgggttgacgataggcgcctggctctgg

SEQ ID NO: 14241 - DNA, 201 bp, Homo sapiens
  source 1..201: mol_type = unassigned DNA
cctcggcccgtccctttttacctcaggctgcctcaacctctccctgaaagcctggcgtccattccccatttcctgggaaacatcttgtcgctttggggtgcgccccgtgaaggagacacgctgggtgaaagccagggactccacaaccaccccccgcccccaccccgggcccagtgcaggggctgccgtgaaggcactggc

SEQ ID NO: 14242 - DNA, 201 bp, Homo sapiens
  source 1..201: mol_type = unassigned DNA
aggctgctgggaaggaactggcctccatggaagtgccccagccttcttgccctcccggcttttttcccccggctgtctcagtgtcccactgaaagcctggcgtcatatccccatcccccgggaaacttcatgcccctttggggtgccccccgtggggaagacacgcaccctgggtgaaagctagggactccatgaacaccc

SEQ ID NO: 14243 - DNA, 201 bp, Homo sapiens
  source 1..201: mol_type = unassigned DNA
accaacccaaatatccatcaatgatagactggataaagaaaatgtggtggggtggagccaagatggccgaataggaacagctccggtctacagctcccagcgtgagcgacgcagaagatgggtgatttctgcatttccaactgaggtaacgggttcatctcactggggagtgctggacagttggtgcaggacagtgggtgc

SEQ ID NO: 14244 - DNA, 201 bp, Homo sapiens
  source 1..201: mol_type = unassigned DNA
gcccgccaccacacccggctaattttttgtatttttaatagagacggggtttcaccgtgttagcaaggatggtctcgatctcctggcctcgtgatccgcccgcgtcggcctcccgaagtgctgggattacaggcatgagccaccgcgcccggccagaagtgtttttatctgtttgggaagttgcctctccctggcacctgc

SEQ ID NO: 14245 - DNA, 201 bp, Homo sapiens
  source 1..201: mol_type = unassigned DNA
tttttcatcttaaggaacaagttcttaattagattagatacagctataagtaaacataaactatgttcttatgtaacctcaagagttattttaggccgggcgcggtggctcatgcctgtaatcacagcactttcggaggccgtggcgggcggatcacgaggtcaggagattgagaccatcctggctaacatggtgaaacca

SEQ ID NO: 14246 - DNA, 201 bp, Homo sapiens
  source 1..201: mol_type = unassigned DNA
ggctaaccaggggcacgtctccccatgcacatggcgggcacctccactccagctggccggcagtggcatcgcacatggcactccacacctgcaccccttccgctttggctcagtgtggccagggatgggccttgtcagtctgcagcgtcacccgccctgtgtaaggctcagaactgctcatccacgcaagtcgggagcccg

SEQ ID NO: 14247 - DNA, 366 bp, Homo sapiens
  source 1..366: mol_type = unassigned DNA
tgagcgacgcagaagacgggtgatttctgcatttccatctgaggtaccgggttcacctcactagggagtgccaggcagtgggcgcaggccagtgggtgcgcgcaccgtgggcgagccgaagcagggcgaggcattgcctcacctgggaagcgccaggggtcagggagttccctttccgagtcaaggaaaggggtgaccgacgcacctagaaaatcgggtcactcccacccgaatattgcgcttttcagaccggcttaaaaaatggcgcaccacgagactatatcccacacctggcttggagggtcctacgcccacggaatctcactgattgctagcacagcagtctgagatcaaactgcaaggcgg

SEQ ID NO: 14248 - DNA, 201 bp, Homo sapiens
  source 1..201: mol_type = unassigned DNA
ataaaggttctccaagtccacactagactcacgagcccagctggcttcacccagtggatcccgcaccgggggccgcaggtggagctgcctgccagtcccgcgcagtgctcccacagtcctcagcccttgggcggtcgatgggaccgggcgccgtggagcagggggcagcgctcattggggaggctcggccctgcaggagcc

SEQ ID NO: 14249 - DNA, 201 bp, Homo sapiens
  source 1..201: mol_type = unassigned DNA
ggtgccgtctgtcacccctttctttgactaggaaagggaactccctgaccccttgtgcttccggagtgaggcaatgcctcgccctgcttcggctcgcgtgcggtgcgctgcacccactgtcctgcgcccactgtctggcactccctagtgagatgaacccggtacctcatatggaaatgcagaaatcactcatcttctgcg

SEQ ID NO: 14250 - DNA, 201 bp, Homo sapiens
  source 1..201: mol_type = unassigned DNA
gccgccttgcagtttgatctcagactgctgtgctagcaatcagcgagactccgtgggcataggaccctccgagccaggtgcgggatacaatctccaggtgcgccgttttttaagcctgttggaaaagtgcagtattccggttggagtgacccgattttccaggtgctgtctgtcacccctttctttgactgggaaagggaa

SEQ ID NO: 14251 - DNA, 384 bp, Homo sapiens
  source 1..384: mol_type = unassigned DNA
ctgaactgcttcaacctcaagcggctcagcctcaagtcctgcgagagcatcaccggccagggcttgcagatcgtggccgccaactgctttgacctccagacgctgaatgtccaggactgcgaggtctccgtggaggccctgcgctttgtcaaacgccactgcaagcgctgcgtcatcgagcacaccaacccggctttcttctgaagggacagagttcatccggcgttgtattcacacaaacctgaacaaagcaaatttttttaaaagcagcgtatgtaagcaccgacacccactcaaaacagctctttcttccgggaaggttattaggaatctggcctttatttttcctcatttctcatgggcaacagaggccaaagaaacgaa

SEQ ID NO: 14252 - DNA, 216 bp, Homo sapiens
  source 1..216: mol_type = unassigned DNA
gaagacgggtgatttctgcatttccatctgaggtaccgggttaatctcactagggagtgccagacagtgggcgcaggccagtgggtgcgcgcaccgtgcgcgagccgaagcagggcgaggcattgcctcacctgggaagcgcaaggggtcagggagttccctttccgagtcaaagaaaggggtgatggacgcagctggaaaatcgggtcactccca

SEQ ID NO: 14253 - DNA, 334 bp, Homo sapiens
  source 1..334: mol_type = unassigned DNA
tgacatagaagacggtgatttctgcatttccatctgaggtaccgggttcatctcactagggagtgccagacagtgggcacaggtcagtgggtgcgcgcaccgtgcgcgagccgaagcagggtaaggcaatgcctcactcgggaagcgccaggggtcagggagttccctttcctagtcaaagaaaggggtgacggacgcacctggaaaatcgggtcactcccacccgaatattgcgcttttcggaccggcctaaaaaacggcgcaccacgagattatatcccgcatctggctcggagggtcctacccgacggagtctcgctgattgccagcacag

SEQ ID NO: 14254 - DNA, 201 bp, Homo sapiens
  source 1..201: mol_type = unassigned DNA
gggatcctaaggtcttgctggtgcggcccaaaggcaccggacgttggggccaagatgacctccgcgctgccatgaaccaggccattggacgcgggctccgcgccgagcctgcagtcctcgaggagtctctcgggttcctccgttttgatcacaccttctcggatggctgccgggcttttgcctgccccgccttgcatcgag

SEQ ID NO: 14255 - DNA, 270 bp, Homo sapiens
  source 1..270: mol_type = unassigned DNA
gccactgcactccagcatgggtgacagagccagcctgaaactctgccctgcgtccttctgagaagtgacagtgtaccggcatggcagccctcacagccctcgctcgctcttggcgcctcctcggccttggcacccactctggccgcgcttgaggagcccttcagcccgccgctgcactgtggaagcccattcctgggctggccaaggccggagccggctccctcagcttgcggggaggtgtggagggagaggcacgggcgggaaccgggg

SEQ ID NO: 14256 - DNA, 253 bp, Homo sapiens
  source 1..253: mol_type = unassigned DNA
cgtgagcgacgtggaagacaggtgatttctgcatttccatctgaggtaccgggttcatctcactagggagtgccagacagtgggcgcaggtcagtgggtgcgcgcaccgtgcgcgagccgaagcagggcgaggcattgcctcacttgggaagcgcaaggggtcagggagttccgtttccgagtcaaagaaaggggtgacggacgcacctggaaaatcgggtcactcccaccggaatactgcgcttttccgacc

SEQ ID NO: 14257 - DNA, 204 bp, Homo sapiens
  source 1..204: mol_type = unassigned DNA
tcccagtaggggcggccgggcagaggcgcccctcacctcccggacggggcggctggccgggcaggggggctgaccccccccacctccctcccggacggggcggcggcaaagactgagacagctccgctgcccgctgaactccatcctcccggccaaaaccaagcttcttaacaaagatcctgaagtgttgagtttactaattta

SEQ ID NO: 14258 - DNA, 228 bp, Homo sapiens
  source 1..228: mol_type = unassigned DNA
gctaccttgcagtttgatctcagactgctgtgctagcaatcggcgagactccgtgggcgtaggaccctccgagccaggtgcgggatatagtctcctgatgcgccggtttttaagcccgtaggaaaagcgcagtattcgggtgggagaggcctgattttccacgtgctgtctgtcacccctttccttgaccaggaaagggaactccctgaccccttgtgcttcccgagt

SEQ ID NO: 14259 - DNA, 217 bp, Homo sapiens
  source 1..217: mol_type = unassigned DNA
cgcaggatgcagattgcagacgctcatcgtctcgcaggcagctccagctcgagtggtggccgtgctgggtctgtgcccggggccttcccccgtatgctttcgctttctagtgtctgcgatgacgtgcgattcactaatcacccggactcagcgcatctctatgttaaatagcgcgtgtccatctgcaaagcacacgacagcccctgcggccactggg

SEQ ID NO: 14260 - DNA, 201 bp, Homo sapiens
  source 1..201: mol_type = unassigned DNA
tcattcttgaagtcactgagaccacaagcccactggaaggaaccaactccggacacatcttgggtgttcgtctgggatattgccacacggtgagtaccatcggactcgtctgggatattgccacacggtgagtaccttcggacctgtttcactttctattctgccctatttttccttagaattcaggggttaaacaccgga

SEQ ID NO: 14261 - DNA, 204 bp, Homo sapiens
  source 1..204: mol_type = unassigned DNA
aagacaacaaactggtcctaaataaaaagtaagaaaaatgccggggaggagccaagatggccaaataggaacagctccggtctacagctcccagcgtgagcgacgcggaaaatgggtgatttctgcatttccatcggaggtaccgggttcatctcactagggagtgccagacagtgggcacaggtcagtgggtgtgcgcaccgt

SEQ ID NO: 14262 - DNA, 223 bp, Homo sapiens
  source 1..223: mol_type = unassigned DNA
cagtgggcatacagaggcagtcgggacccgtctggaagagcctccgcccggggtaaggagccgggactgtgtctaggaggcagtggggagctccggagagcgaagcgcctcctgcgcagactcgcgtgcttggagtaccggagcctgcagggcaagagagggtcttcagaagacccacgacgttccactgggatgcagagggaaacggttacttgtacttcta

SEQ ID NO: 14263 - DNA, 201 bp, Homo sapiens
  source 1..201: mol_type = unassigned DNA
cccaaagtactaggattacaagcagaaccaccgcgtctcttgttttcttttttgtttttgtttttgttttgttgttgttgttgatgttgttacagagtttcgctcttgtcgcccaggctgggatgcaatggtgtgatctcggctcattgcagcctccgcctcccggcttcaagcaattctcctgcctcagccttgtgagta

SEQ ID NO: 14264 - DNA, 203 bp, Homo sapiens
  source 1..203: mol_type = unassigned DNA
agtacaaataaattggtcgggcggtagtcccagctactcgggaggctgaggcagcagaatagcgtgaacccgggaggcggagcttgcagtgagccgagatcgcgccactgtactccagcctgggtgacagagtgagactacgtctcaaataaaaaaaaaaaaaaaaaaaaaaagcacttccctagacctagcttgatattagg

SEQ ID NO: 14265 - DNA, 201 bp, Homo sapiens
  source 1..201: mol_type = unassigned DNA
ccacgcccggctaatttttttgtattattagtagagacgaggtttcaccgaggtttcaccgtgttagccgggatggtctgggtctcctgacctcgtgatccgcccaactcggcctcccaaactgctgggattacaggcatgagacaccgcgcccggctgttgtctgatttttttcagcagtgttttgtagttctttttgta

SEQ ID NO: 14266 - DNA, 201 bp, Homo sapiens
  source 1..201: mol_type = unassigned DNA
ctcccgagtagctgggactacaggtgcctgccacctcgcccggctaattttttgtatttttagtagagatggggtttcaccgtgttagccaggatggtctcgatctcctgacctcgtgatccgccagcctcggccccccaaagtgctgggattacaggcgtgagccaccgcgcccggcccaatttaatttttaacaatggt

SEQ ID NO: 14267 - DNA, 201 bp, Homo sapiens
  source 1..201: mol_type = unassigned DNA
aaaagtcacagggggcgtgaggacagacggcgtgtcctttcctacacatatggagacgcaggccggagcaacggcacacggaccacgcacacgcggcggacgcaccaacgcctacgcagaagagaacaaaagtcgcttctaactgggcacaaaccctctgcacccaaatatcccgacacccacaaacaaaatcagaacaga

SEQ ID NO: 14268 - DNA, 201 bp, Homo sapiens
  source 1..201: mol_type = unassigned DNA
tgatctgccctcctcggcctcccaaagtgctgggattacaggcgtgagccaccgcgcccggcccaggtcactttttttttttttttttttttttttgaggcggagtctcgctctgtcgcccaggctggagtgcagtggcgcgatctcggctcactgcaagctccgccttccgggttcacatgattctcctgcctcagcctc

SEQ ID NO: 14269 - DNA, 201 bp, Homo sapiens
  source 1..201: mol_type = unassigned DNA
ggattacaggcgtgagccaccgcgcccggcctaaactatggatttttttttcccagtggagtttcgctcttgcccaggctggaataggatggcacgaactcggcttactgcaatctccacctcccgggttcaagcgattctcctgcctcagcctcccgagtagctgggattacaggcatgtgctaccatgcctggctagta

SEQ ID NO: 14270 - DNA, 201 bp, Homo sapiens
  source 1..201: mol_type = unassigned DNA
aattttttccccacccttcccgcctttctattccacaaaaccgccattgtcatcatggcccatccccaatgagctgctgggcacacctcccagacggggtcgtggccgggcagaggggctcctcacttcccagtaggggcggccgggcagaagcgcccctcacctcccggatggggcggctggccgggcggggggctgacc

SEQ ID NO: 14271 - DNA, 201 bp, Homo sapiens
  source 1..201: mol_type = unassigned DNA
gggggcccttcaagctcagctttgggcccgggtcggggtacagggtagagcgggcctccccagcccctgccatgaggccaaggcagtgcatcgttcgcagcgtacattcagaaaccaaagcctaggagctggttatcattccggtttacagctgatggaagagcaggtgcttccgagaacccacagtgctctttggccagt

SEQ ID NO: 14272 - DNA, 201 bp, Homo sapiens
  source 1..201: mol_type = unassigned DNA
tgggcagcagagtgagactctgtcttaaaaaaaaaaaaaaaaagggggggccgggtgcggtggctcacgcctgtaatcccagcactttgggagaccgaggcgggcagatcacgaggtcaggagatcgggaccatcccagctaaaacggtgaaaccccgtctctactaaaaatacaaaaaattagccgggcgtagtggcggg

SEQ ID NO: 14273 - DNA, 201 bp, Homo sapiens
  source 1..201: mol_type = unassigned DNA
gtgggagtcacagggtttcaggggaggagcgttccaggccgcggtaacagcaggtgcaaaggccctgaggcaggacggggcagggaggtccagagtccaccgcgcagagacccgggaggccggcaggcacggtgaggaccttgacttaaacccaggaaaggggaaccacactggggcatgacctcctgtactttccgagat

SEQ ID NO: 14274 - DNA, 201 bp, Homo sapiens
  source 1..201: mol_type = unassigned DNA
gggatttccccatgttggccaggctggtctcgaactcctgacctcaagtgatccacctgcctcggcctcccaaagtgatgggattataggcatgagccaccgcgcccggccaagggtcttttcagatgtaatcaagttaagatgaggtcatactgagttaggtgggccctaaatccaatggctagtgttcttataagcaca

SEQ ID NO: 14275 - DNA, 211 bp, Homo sapiens
  source 1..211: mol_type = unassigned DNA
gccctagggccggaggagcaggagacctgggcagcggggtgggcgagtgccgggaggaggtaagaggtcgcgggggaggaagacgctccccccggccttgcggggcaggtcgcgcagggcaggtcgtgcggggcaggtggggggtgccaaggaagtccgggcgtggccacaccgcagagaaagccatgggaggcacgtcctgagagctggg

SEQ ID NO: 14276 - DNA, 201 bp, Homo sapiens
  source 1..201: mol_type = unassigned DNA
gcagccaaagccatcttcttggttgaaagatactcttttcggggggaggagccaagatggccgagtaggaacagctccggtctacagctcccagcgtgagcgacaaagaagacgggtgatttctgcatttgcatctgaggtacccggttcatctcactagggagtgccagacagtgggcgcaggtcagtgggtgcgcgcac

SEQ ID NO: 14277 - DNA, 201 bp, Homo sapiens
  source 1..201: mol_type = unassigned DNA
gctcaggacctgcagcccaccatgcctgagcctcccacccactccatgggctcctgtgccgcccaagcctcccggacgagtgccaccccctgctccacggcgcccagtcccatcgaccacccaagggctgaggaatgtgagcacacggcgcaggactggcaggcagctccacctgcagccccggtgtgggatccactaggt

SEQ ID NO: 14278 - DNA, 201 bp, Homo sapiens
  source 1..201: mol_type = unassigned DNA
tggtaacattgtgaagacgtaggttctccatgggaaagactgttgtccggaagtttccacacaacaggtccccactgagattccaaggctgacagcacggcgggagtccctgggacccctgggcccggcacagcgccaccgcagcaggcaggcaccgggtggccagaagtcgatcattctcttaaatggcctgtacatatc

SEQ ID NO: 14279 - DNA, 201 bp, Homo sapiens
  source 1..201: mol_type = unassigned DNA
ctcccatgggctgacctggtgatcctccatggagaatgcgtaggagccggatattggcactgccaggtggaaaagtcccctgtcagggtgaaaagtcagacggcgtctgcctctcgctcttggagtgctcctggcctaacgcagcagtttcgcagataaacgttacagaaggtagagcgctctacagatatgaaggagtgg

SEQ ID NO: 14280 - DNA, 201 bp, Homo sapiens
  source 1..201: mol_type = unassigned DNA
gacttctggacccgctgggctgtttccgcacccggcttccctccctcaagcttgcggccgggtgtggctccctcaacctcagcgccgacctccgtgtctgcgcgctctctctctaccttcctcatccgcggggtcaggggtcacacggcaccgtcgcctgggtctccgagcagggagagtcgagtgctgactctgccagaa

SEQ ID NO: 14281 - DNA, 201 bp, Homo sapiens
  source 1..201: mol_type = unassigned DNA
ggacattttacaaaactcctgacgagtcctcctcaaaaccactaggttggccgggtgcggtggttcatgcctgtaatcccagcactttgggaggccgaggcgggcagatcacaaggtcaggagatcgagaccatcctggctaacacggtgaaaccccgtctctactaaacaatacaaaaaattagctgggcgtggcagcgg

SEQ ID NO: 14282 - DNA, 201 bp, Homo sapiens
  source 1..201: mol_type = unassigned DNA
cccctccccatccttccaggggcctgaccccttccccaaccgcacctttatagaatggtcggccagacaggaagtcccggctggcgaagcccagcccccgcgggcacaggctggcgaactccagagactcgggatccgggcaggcctcgcactcgactccccacacggccccgatggagcagcagcagacgtccatccggt

SEQ ID NO: 14283 - DNA, 201 bp, Homo sapiens
  source 1..201: mol_type = unassigned DNA
aaattagccaggcctggtggcaggcacctgtaatcccagctactccaggggttgaggcaggagaattgcctgaacccgggaggtggaggttgtagtgagccgagattgcgcctttgcactccagcctgggggacaagagtgagacttcgtctcaaaaaaaaaaaaaaaaaaaaaaaaaggccgggtggctcacacctgtaa

SEQ ID NO: 14284 - DNA, 201 bp, Homo sapiens
  source 1..201: mol_type = unassigned DNA
catcgccatgacctgcgagcgcgtgttcctcatctcgctagagctggcagtgtgcgccattcacccggtgcccggccactaccgcttcacgtggacggcgcggctggccttcacgtacgcgccctcggtggccgaggccgacgtggacgtgctgctgtccatccccatgttcctgcgcctctacctgctgggccgggtgat

SEQ ID NO: 14285 - DNA, 201 bp, Homo sapiens
  source 1..201: mol_type = unassigned DNA
cccgcggggcccgtccgctcctccagccgctgcctcccgggcggcgctcgccggcgccgactcccataatttactttttctagacagagtctttctctgtcgcccaggctggagggaagtggcatgacctcagctcactgaaacctactccttccgggttcaagcgattctcacctctgcctttggagtagctgggactac

SEQ ID NO: 14286 - DNA, 201 bp, Homo sapiens
  source 1..201: mol_type = unassigned DNA
ccacctcagcctcctgagtagctgggaccacaggcttgtgccatcatgcccagctcattttttattttattttatttttatttttattttttttttgagacggagtctcgctctgtcgcccaggctggagtgcagtggcgggatctcggctcactgcaagctccgcctcccgggttcacgccattctcctgcctcagcctc

SEQ ID NO: 14287 - DNA, 201 bp, Homo sapiens
  source 1..201: mol_type = unassigned DNA
aaatggtgatttagaggccgcccccactcgacgggctttcttagccgaagacgttcagctaatgaacctcaagcagattcatggccgggtgtgaagtcaacggagtcctcactccgtggagacgagcagcataaatctttgtttttaatgtctaatgatatgtaaaatatttaaatttgcaacgcagaattattaagctgc

SEQ ID NO: 14288 - DNA, 201 bp, Homo sapiens
  source 1..201: mol_type = unassigned DNA
ggcaggcggattactttagcttaggagttcgagaccagcctgggtaacatggcaaaatcccatctctacaaaaaatacaaaaattagccggtcatggtgccgtgcacctgtagtcccagctactagggagactgaggtgggagggtcacttaagcctgggagaggcgggtgtggtggaggttgtagtgagccaagatgcac

SEQ ID NO: 14289 - DNA, 201 bp, Homo sapiens
  source 1..201: mol_type = unassigned DNA
tagattgacagattttttttttttttgagatggagtcttgcactgtcacccgggctggagtgcagtggtgcaatctcggctcaccgcaacctccccaacccgcgttcaagcaattctcctgcctcagcctcccgagtagctgggattacagggcgtgccaccacgcctggctaattttttgtatttttagtagagatgggg

SEQ ID NO: 14290 - DNA, 201 bp, Homo sapiens
  source 1..201: mol_type = unassigned DNA
cctcgggcggcaaggattccacggtgctggcacacgtgctgcgcacgctggcaccgggcctgggcatcttactgcagctcatggctgtagacaagggcatcgggcgtggcttagcgggaggatcccagtaaggagctggggaaatacgcatgtgcctatttagggccggagcctactgaaggctcatgtgggtagtacgtg

SEQ ID NO: 14291 - DNA, 201 bp, Homo sapiens
  source 1..201: mol_type = unassigned DNA
cggctcattgcaacttccaccttccgggttcaagcgattctcctgcctcagcctcctgagtagctaggattacaggcatgcaccaccacccccggctaatcgttgaattttcagtagagacggggtttcatcacgttcgcaaggctggtctcgaacccctgatctcaggtgatgcccccacgtcggccttccaaagtgcca

SEQ ID NO: 14292 - DNA, 201 bp, Homo sapiens
  source 1..201: mol_type = unassigned DNA
cggcctcccaaagtgttgagattacaggcgtgagccaccgcgcccggcccacctcaggtgatccacccctctcagcctcccaaagtgttgagattacaggcgtgagccaccacgccgggcccacctcaggtgatccacccccctcggcctcccaaagtgttgagattacaggcgtgagccaccgcgcccggcccacctcag

SEQ ID NO: 14293 - DNA, 201 bp, Homo sapiens
  source 1..201: mol_type = unassigned DNA
gacttgagaaccgtctgcatcagcctggcttcctgcacagtgtctgcgccggtgcacaccttagaggggagctgcgccatcagatgaaccaggaccctggcggaggaagggggtgccggcagggctcccatggcacctgctgcctgtggctgaggggagcctggaagggcaccagcctcacccacccctggccgagacccc

SEQ ID NO: 14294 - DNA, 201 bp, Homo sapiens
  source 1..201: mol_type = unassigned DNA
tccggcacactcagagcacactggggctggggtagatggtggcacctgtcttggctggaggagttgggagggctggggaagggacgtgtgatctcctctccgataaacctggacgagatgccaagtataacacagaggctggcggcggggcctcctcctgttcccggtggatcaactcattgtgggactttgggcaacttt

SEQ ID NO: 14295 - DNA, 201 bp, Homo sapiens
  source 1..201: mol_type = unassigned DNA
ttaaaaaacacacacggccgggcgcggtggctcacgcctgtaatcccagcactttgggaggccgaggtgggcggatcacgaggtcaggagatcgagaccacggtgaaaccccgtctctactaaaaaaatacaaaaaattagccgggcgcagtggcgggcgcctgtagtcccagctgctcgggaggctgaggcaggagaatg

SEQ ID NO: 14296 - DNA, 201 bp, Homo sapiens
  source 1..201: mol_type = unassigned DNA
acggccacatggcagggcccctgctgcctccaccgccgccagcccagccgtccgccactctccccagtggtgcccctgccaccaatgggccccccacaaccgactcggcccacgggctgcagatgctgcggaccattggcgtggggaagtatgagttcaccgacccggggcaccccagaggtaagtcctgctgccacgtgc

SEQ ID NO: 14297 - DNA, 279 bp, Homo sapiens
  source 1..279: mol_type = unassigned DNA
gggcctgggctcgctaggtgtagaacaaggagaaaggggtagaggggaagagtcgggtcgaaccccagcgagggacccggccttccctggaggagaggatcgtactcgcgccaggagtatggactcacccagggagtgcttgggcggagaagcagcctctgctccaggccttccgctgcggcacctaaagaggccgggcggcccagaggcccgcaagccacgcccccttccaggccccgcctccgtttggccactccccttgctgtcagctcttccacc

SEQ ID NO: 14298 - DNA, 201 bp, Homo sapiens
  source 1..201: mol_type = unassigned DNA
ctggctgctatgaaatcataaattatgtttacagaaatttcagtctgagaaagaacctagattttcctttttttttttttttttttttgagactgagtctcgctctgtcgcccaggctggagtgcagtgatgccatctcggctcactgcgagctctgcctcccgggttcacgccattctctggcctcagcctcccgtgtag

SEQ ID NO: 14299 - DNA, 201 bp, Homo sapiens
  source 1..201: mol_type = unassigned DNA
tcgggggcggggcggggcggggcggggcggggcgggggggtggggctgaggcaggagaatggcgtgaacccgggaggcggagcttgcagttagccgagatcgtgccactgtactccaacccgggcgacagcgactctatctcaaaaaataataataataaaaaagaataaagattctataggcacttcttttacagcagag

SEQ ID NO: 14300 - DNA, 201 bp, Homo sapiens
  source 1..201: mol_type = unassigned DNA
ggggtctcaccgtgttagccaggatggtctcggtctcctgatgtcgtgatcctcccatctaggcctcccaaagtgctgggattataggcgtgagccaccgcgcccggcctagttcttcatttctaacaagttttcaggtgatgcttatgttggtagtcctctgagactatcacactttaagtttcagggtgttagaaaaac

SEQ ID NO: 14301 - DNA, 201 bp, Homo sapiens
  source 1..201: mol_type = unassigned DNA
tgttgttgttgtttttaagttggagtcttgttctgtcacccaggctgcagtgcagtggtacgatctcggctcactacaacctcggcctcccgggttccagcgattctcctgcctcagccacccaagtagctgggtctacaggcgcatgccactacgcctggctaatttttgtatttttaggagagacaggttttcaccatg

SEQ ID NO: 14302 - DNA, 201 bp, Homo sapiens
  source 1..201: mol_type = unassigned DNA
aaccgagctgtggaatggggttccgtggagcaggttgagtgtgccggtcgtggacgggtcgtgggcgggactccccagtgtgtcaccactgaggcatcttcgccctcttacgtgtctctgtttctctctctagaagtccaacacctccgagaggactcaaaacacagagtgaccagctcctatgtgcatttcctggacaaa

SEQ ID NO: 14303 - DNA, 201 bp, Homo sapiens
  source 1..201: mol_type = unassigned DNA
aggggagacgaagaaggagggggcagcccgctcaggaggccaggggggcatccgtgcccggctcaggcccatcgacgcagacaccattgacatttacgcccgcgctgtgttccctgcggcgtttgcggccgtcaatgtcatctactgggcggcatacgccatgtgagcacaggactcaggccaccctcgcttgtcctggcg

SEQ ID NO: 14304 - DNA, 201 bp, Homo sapiens
  source 1..201: mol_type = unassigned DNA
ccatacaccccacgcgccctgcccaccacgaggcctgtaccctctgggcagcaggtgccgcgcgcccccgggtaccttgtaggtggagccgtcggcgcagcgcagcaccccgtgtccctgacgccggtcccggacccagtcgccgtcgtacttgtcaccgttcctgggggacacacgcacggagtccactctcaacagggg

SEQ ID NO: 14305 - DNA, 201 bp, Homo sapiens
  source 1..201: mol_type = unassigned DNA
tctactacaaatacaaaaaattagccgggcgtggtggcgggcacctgtagtcccagctactcggaaggctgaggcaggaaaatgatgtgaacccgggaggcggagcttgcagtgagccgagatcgcgctgctgcacccaagcctgggcgacagagcgagactccgggtcaaaaaaaataaaagaatatagggtatggtatc

SEQ ID NO: 14306 - DNA, 201 bp, Homo sapiens
  source 1..201: mol_type = unassigned DNA
cagagtagctgggaccacaggcgcccactgccacgcccggcttatttttttttgtatttttagtagagacggggtttcaccgtgttagccaggatggtctcgatcttctgacgtgatccacccgcctcggcctcccaaagtgctgggattacaggcgtgagccaccgtgcccggcctattcatgtgctttctgggaagggg

SEQ ID NO: 14307 - DNA, 201 bp, Homo sapiens
  source 1..201: mol_type = unassigned DNA
aggcgcccgccaccacgcccggctaattttttgtatttttagtagagacggggtttcaccatgttagccaggatggtctcgatctcctgaccttgtgatccgcccacctcgtcctcctaaagtgctgggattacaggcgtgagccaccgtgcccggccgcctctcggcatacctcttattcctagcatgtggctctcacac

SEQ ID NO: 14308 - DNA, 203 bp, Homo sapiens
  source 1..203: mol_type = unassigned DNA
gttggtcatggaaggctacagtttcgcagatggtgtcggtggagtttggggcagggcattctgagcctgggaaggtttggggtgaaggcccggaggctggcgcgtaggaggctaaagcagcagggaggtctggggagagtcaggtggggttgtgtcttccacgttgcaggccgtgctcacagatggtgaaagacgttgtggaa

SEQ ID NO: 14309 - DNA, 201 bp, Homo sapiens
  source 1..201: mol_type = unassigned DNA
tcccaagtagctgggactacaggcgcccaccaccacgcccggctaatgtttttgtttttttagtagagacggggtttcaccgtgttagccaggatggtctcgatctcctgacctcgtgatcctcccgtctcggcctcccaaagtgctgggattacagcaatcactcgatggcgtgagccatcgcgcccggccatgtatgat

SEQ ID NO: 14310 - DNA, 201 bp, Homo sapiens
  source 1..201: mol_type = unassigned DNA
cctactctcgtgaaaactcttgtgcctgaaaattattgtaaaatatctggaattattattattatttatttttattttttgagacggagtctcgctctgtcgcccaggctggagtgcagtggcgcgatctcggctcactgcaagctccgcctcccgggttcacgccattctcctgcctcagcctcccgagtagctgggact

SEQ ID NO: 14311 - DNA, 201 bp, Homo sapiens
  source 1..201: mol_type = unassigned DNA
ttggcgagagacaaggcacccagggaaagaagaaaaaagcccaggaagggactccagtctgccagacccggggcagaagcccttctcggacgagctttcacggagaaactcaaataccaggggctccggaaggtcggaagcctccaagctgcccaggaaaagaccaaagagatataaactacaaaagttctgggaccccca

SEQ ID NO: 14312 - DNA, 201 bp, Homo sapiens
  source 1..201: mol_type = unassigned DNA
gtcactgatcctgagcttccgttttttcatctataaaactgagattagggccgggcatggtggctcactcctgtaatcccaacactttgggaggccgaggcgggcggatcacgaggtgaggagtttgagaccagcctgaccaacatggtgaaaccccgtctccactaaaaatacaaaaattagccgggcgtggtggcgcgt

SEQ ID NO: 14313 - DNA, 201 bp, Homo sapiens
  source 1..201: mol_type = unassigned DNA
gcatgttcattgcagaactattcacaacagcaaagacatggatagaccggattaagaaaatgtggtgtatatatatatatgccatggaatactatgcagtcgtaaaaagaacaaaatccggtcctttgcagcaacatggatgcagctggaggccattatccggagtgaattaacacaggaacagaaaaccaaatactgctt

SEQ ID NO: 14314 - DNA, 201 bp, Homo sapiens
  source 1..201: mol_type = unassigned DNA
ccccagttccgtgaccggccctctgctctgtgctgacacccagcaccctccccggcctctgctccgaggggaaaataaaacaggggccttcaggcctcaccgctggctcactccatcgcagcaaatcgaccgagggtcctctgctgcgtccttgcggcctgttgtcttactcagcggccctgacacccggcatttatttaa

SEQ ID NO: 14315 - DNA, 201 bp, Homo sapiens
  source 1..201: mol_type = unassigned DNA
gcgggcggatcacgaggtcagtagattgagaccattctggctaacatggtgaaacccagtctctactaaaaatacaaaaaattagccgggtgtggtggcacgcgactgtagtcctacctactggggaggctgaggcaggagaatcgcttgaacccgggaggcggaagttgcagtgagccgagatcgcgccactgcactccc

SEQ ID NO: 14316 - DNA, 201 bp, Homo sapiens
  source 1..201: mol_type = unassigned DNA
tctcactctccagctagctctttgtgtagtgtccagggccccggcagtcaggatagagcgagcaaaagaagatggacagtggacagggcgcagtggctcacgcctgtaatcccagcgctttgggagagcgaggcgggcagatcacaaggtcaagagatcaagaccattctggccaacatggtgaaaccctgtttctactaa

SEQ ID NO: 14317 - DNA, 201 bp, Homo sapiens
  source 1..201: mol_type = unassigned DNA
aaggcaggcggatcacggggtcaggagttcgagaccagcctggccaacttggtgaaaacccgtctctactaaagatacaaaaattagctgagtgttgtggcgcacgcctgtaatcccagctactggggaggctgaggcaagagaatcacttgcaaccgggaggcggaggatgcagtcagcgagatggcgccactgcattcc

SEQ ID NO: 14318 - DNA, 201 bp, Homo sapiens
  source 1..201: mol_type = unassigned DNA
actcagggggctgaggcaggagaatcgcttgaacccgggaggcggagtttgcagtgagccgagattgagccactgcacactccagcctgggcaacaagagcgagactcagtctcagaaaaaataaataaataataaaataaaaagcaggccgggtgcgatggttcacacctataacaccagcactttgggaggccgaggtg

SEQ ID NO: 14319 - DNA, 3238 bp, Homo sapiens
  source 1..3238: mol_type = unassigned DNA
tagaacgccaggcgtgaaaggtgacgttgaggcagcacgagggaaaaagcagcaggcagcgatcgtcacacggacgacagtgccttcccggcagcccctgcgccagactcggggttgtcgtggagttcctgacttgaacccagggtgcgtgtcgcgcccacggggggacaccccaaagcggcaagaatgccccctgggaagggaacaggacgccaggcttgaaaggggactttgaagcagtccaggaaaaaacttcccacggaccacggtgccttcccggcagcccctttgccaggcccgagggggttgttgtgtcccaggcttgcacccagggttccacggggggcaccccaaagcggcaagtaggttcccaggggaaggggacagcacgtcaggcttggagggggacgttgaggcagccccgggaataaagaggggatgctggggtcctgccacggataacactgtcttcccgacagcatctgtggtgggcctgggagcgtcatggagtccttggcttgcacccaaggtgcgtgtctcgccctcggggggcaccacaaagcggcaagaaggccaccgggggaagggtatgggacgccagggttgaaagggatagttgaggcagtccggggaaaaacgtggcaggctggggtcgtcccatggacgacagtgccttcccagcagcccctgcgtcaggcccggggtggtcgtggagtccctggcttgcaccgagggtgcgggtcgcacccatgggggcaccccaaagtggcaagaaggccgccgggcgaacgccacagaaggccaggctttaatggggatgctgaggcagcacagagagaaaagcggctagtcgggttcctcctacggatgacagtgccttcctggcagtccctgcgctgggcccggggggatcgtggagtccctatcttgcacccagggtgcgtgtttcgcccatgggaggcaccccaaagcggcaagtaggcccctgggggaaggggacagcacctcagacttgaagggggactttgaggtagcccgtggaaaaaaacggcgacgctgagtttctcccacaaacgacagtgccttcctggcagccccttcgctgggccagggtggtcctggagtccgtggcttgcacccagggtgcgtgtctcgctcaagggggcaccccaaagcggcaagtagattcccgggggaagggagagcacgtcaggcttgaaggggaggttgaggcggccccggggtaaaagtggtgaagctggggtcctcccacggatgacaccgccttcctggcagcctctgcagtgggcccagaggtgtcgtggagtctctggcttgctcccaggttgtgtgtctcgcccacgagtggcaccacaaagcagcaagaaggcccccaggggaagggtacaggactccagggttgaaaggtagagttgaggcagaccggtgtcatcccaaggacaacagtgtcttgtccggtagcccctgcatcgggcctggggtggttgtggagtccctggcttgcacccggggtgcgtgtcgtgcccacgatgggcaccgcaatgcggtaagaagtccccgagtggaagggaacaggacgccgagcttgaaaggggacgttgaggcagtccggggaaaaaatttccactgagaacagtgccttcccggcagcctctgagtgggacccaggtggacggtggagcccctggcttggacccagggtgcctgtcttgctcacggggtgcacgtgaaagtggcaacagggcccccgggggaaggggacaacatgtcaggcttgaagagggacgttgggccagccagaggaaaacagcggctaggctgtggtcgtcccacagaccacagtgccttcccggcagcccctgagcctggcccaggcgggggggtttggagtccctgtcttgcaacagagtgcgtgtctcgcctaagtgtgcacgcgaaagctgcaagaagggctccgggggaagggaacaggatgccaggcttgaaaggggactttgaggcagtccagggaaaaactttccacggaggacagtgacttcccgacatcccctgcgcctggccctgggggtcttggagtccctggtttacacccagggtgcgtgcctcgcccacgggtggcaccccaaagcagcaagaaagccccggggggggaagaacaggatgccagacttgaaaggggacgttgaggcagcccaggaaaaaaaggggcgaggctggggtcctttcacggatgacagtgccttccctacagcccctatgccagtcccgggagggtcgcggagtccctgtcttgcacacaatgtgcgtgtctcgcccacggggggcaccccaaagtggcaagaagtcccccgcgggaaggcaacaggacgccaggcttgaatggggacgtttaggtagcctggagaaaaaagcagcgaggctggggtgatcccacgaatgacagtgccttaccggcagcccctttgccgggcatgcgggggttgttgattccctggcttgcacccagggtgagtgtcttgcccacggcgggcaccacaaagcagcaagaaggttcccgggggaaagggacagcacgtcagtcttgaagggggaagttgaggcagccccggggaaaaaaagcggggatgctggggtcctctcacggacgacactgccttcccagcagcctctgcagtgggcccgggagcgtcctggagtccctgtcttgcaccccgggtgcgtgtctcacccacggggagcaccacaaagcggcaagaaggccactgggggaagggtacaggacgccagggttgaaggggatagtggagacagtccaaggaaaaaagtggcgggatggtgtcgtcccaaggatggccacccctgcgccgggccagggatggtcgcggagtccctggcttgcacccaggttgtgtgtctcgcccacagggggcaccccaaagcagcacgaaggcctccaggggaagggaagaggacgccaggcttggaaggtgacgttgaggcagcagggggtaaaaagtggcgggccgggccctcccacggatgacagtgccttcccggaagccgctgcgcagggcccggcgtgtttgtggagtctctggcttgcacccagaatcgtgcggcgcccacgacgggcaccccaaagcggcaagatatcccccgctggaagggaacaggatgccaggcttgaaaggagaagttgagccagtccggggaaaaa

SEQ ID NO: 14320 - DNA, 201 bp, Homo sapiens
  source 1..201: mol_type = unassigned DNA
ccaaggctattacctcaaagtgtctcagaaaataatatacagaaggccgggcgcggtggctcacgcctgtaatcccagcactttgggaggccgaggggggcggatcacgaggtcaggagatcgagaccatcctggctaacacggtgaaaccccgtctctactaaaaacacacacacacaaaattagccgggcgaggtggca

SEQ ID NO: 14321 - DNA, 201 bp, Homo sapiens
  source 1..201: mol_type = unassigned DNA
ccaccatctattcattactctgcctgcaatttgggccatcactcattagtaatttgatgattaacacgccccacctcagcaggtgtgcaaggtgcgggggcggacacaaagactgcggcttccggagaggacggctagggggccgcctttgcaagtgctctccaaaataattggtcaccgttctcgagtgcttgggcgtcg

SEQ ID NO: 14322 - DNA, 201 bp, Homo sapiens
  source 1..201: mol_type = unassigned DNA
acggtgattagaaatgcatcaaactctgaatgtacaaaagagagagcttcaatatgaaacagtaatcctctgagaacgaagaccccgcagtgccggtgcccgctgggccgtgcaggtctcggccgccccacgcccgtgtccgtctccaccgtgaccccctcgcccccggcacgcccagggtcaacccccgggcttattgca

SEQ ID NO: 14323 - DNA, 201 bp, Homo sapiens
  source 1..201: mol_type = unassigned DNA
cctggggatcattctgcctccttgctctgacttcttctttttttttttttttttttttgagacggagtctcgctctgtcgcccaggctggagtgcagtggcgcgatctcggctcactgcaagctccacctcccgggttcacaccattctcctgcctcagcctcccgagtagctgggattacaagtacccgccaccacgccc

SEQ ID NO: 14324 - DNA, 201 bp, Homo sapiens
  source 1..201: mol_type = unassigned DNA
cccccgggacggggggacccccaggcactcccgggccctgagctgggccgccagggccgcccgccctttgccgctcttcttgggccgagctccgcccccgcgccctgcagtggagcagccgcccccaaaggtgtacgtgaccagggtgcggccgggacagcgggcatccccccgggccccagcgccgcgtgcgccctggcc

SEQ ID NO: 14325 - DNA, 201 bp, Homo sapiens
  source 1..201: mol_type = unassigned DNA
cggcgcccggcatgaaactttttttttttttttgagacagagtctcgctcttgcgcccaacctggagtgaagtggcacgattttggctcatggcaacctccgccccgcaggatcaagctattatcctgactcagcctcccgagcagttgggattacaggcacccaccactatggccggctaatttttgttttttgcttttt

SEQ ID NO: 14326 - DNA, 201 bp, Homo sapiens
  source 1..201: mol_type = unassigned DNA
aagcagcttcttaaaattttaaaaagtaagcatagctctaggaaggagggaggtcagtgaaatcaaactcctgtcgacaagcttaaagtaactggcaagacgctgggaaactagatactgaaacatccgctcttaacttttaacctgtcactatttgaaataaagttatcagggatagccgggcgcggtggctcacgcctg

SEQ ID NO: 14327 - DNA, 201 bp, Homo sapiens
  source 1..201: mol_type = unassigned DNA
atctattgaagaagctgaagtgtgaagtgtgaaattgaagaaccctgaaatgtattgagcagtgaaaagattatgtatacaaaaacaggttggccgggtgcggaggcaggcagatcacctgaggtcaggaggcgcgatctcggctcactgcaagctccacctcccgcgttcacgccattctcctgcctcagcctccggagt

SEQ ID NO: 14328 - DNA, 201 bp, Homo sapiens
  source 1..201: mol_type = unassigned DNA
attttgggaggccaaggcaggcggctgggaggtgtaggttgtagtgagccgagatcacgccactgcactccagcctgggcaccattgagcactgagtgaacgagactccgtctgcaatcccggcacctcgggaggccgaggttggcggatcactcgcggttaggggctggagaccggcccggccaacacagcgaaaccctg

SEQ ID NO: 14329 - DNA, 201 bp, Homo sapiens
  source 1..201: mol_type = unassigned DNA
gtggcgcaatctcggctcactgcaagctccgcctcccaggttcatgccattctcctgcctcagcctcctgagcagctggtactacaggcgccgaccaccacgcccggctaattttttgtattttttgatagagacggggtttcatcgtgctacccaggatggtctcgatattctgaccttgtgatccgcctgcctcggcct

SEQ ID NO: 14330 - DNA, 201 bp, Homo sapiens
  source 1..201: mol_type = unassigned DNA
ggtgggcgggtcacgaggtcaggatatcgagaccatcctggctaacacggtgaaaccccgtctctactaaaaatacagaaaattagccgggcatgttggcgggcacctgtaagtcccagccactcgggaggctgaggcaggagaatggcgtgatcccgggaggcggagcttgcagtgagccgagatcacgccactgcactc

SEQ ID NO: 14331 - DNA, 208 bp, Homo sapiens
  source 1..208: mol_type = unassigned DNA
tttatttatttatttttgagacagagtctcgctctgtcgcccaggctggagtgcagtggtgtgatctcggctcactgcaagctccgcctcccgggttcacgccattcggcctcagtctcccgagtagctgggactacaggcgcccgccaccacgcccggctaattttttatatttttagtagagacagggtttcatcatgttagccag

SEQ ID NO: 14332 - DNA, 201 bp, Homo sapiens
  source 1..201: mol_type = unassigned DNA
tttctttcttttttttttttttttttgagacggagtctggctctgttgcccaggctggcgtgcagtggctcactgcaccctccgcctcccgggttcaagcgattctcctacctcagcctcccaagtagctggggctaaaggcctgtgccactatgcccggctaattttttgtactttagtagagacggggtttcaccgtgt

SEQ ID NO: 14333 - DNA, 201 bp, Homo sapiens
  source 1..201: mol_type = unassigned DNA
ccgtggtgcaatctcagctcattgcaacctctgccggcagggttcaagcaattctcctgcctcagtctcccgagtagctgggattacaggcacgcaccacgatgcccggttaatttttgtatttttagtagagatggggtttcaccatgttgaccaggctggtcttgaactcctgacctcaggtgattcgcccacctcggc

SEQ ID NO: 14334 - DNA, 201 bp, Homo sapiens
  source 1..201: mol_type = unassigned DNA
gtgggtttcaaacatcttacaagctagagtaatcagaacagtatggtactggtataaagacaggtacacagcccgtccggtcccgtcccgtcctgccgccgcgcctgtcagccatgagctccatgcagttaaacaaaggcccctctgtggactcttggctgaggttaagaaccggctcctgtccaaatatgacctccagaa

SEQ ID NO: 14335 - DNA, 201 bp, Homo sapiens
  source 1..201: mol_type = unassigned DNA
cattgacctggaagaacggaatgatagttagtgaggcacactcagcaaccgagcacggccagtgccggtccccggctcccgagacactgacccacgcagcgccaggatccggggaccctctaggtgcaaatcagaggccaaacagcctgcctggccaatgggtcagaatctgtggttgaacagaggctttgttgtggtttt

SEQ ID NO: 14336 - DNA, 201 bp, Homo sapiens
  source 1..201: mol_type = unassigned DNA
ctattcttgggggatgagaggagggatggtgagaggacactcttaaagaacatttggggccggggaagaatccttcatgatctcgccctataacctggccgctcatcttgcattctgctgcacgctgcccggcctttggccatgttatgtgaactcctggagccatccttctttcttctttacctggatggagagggcctc

SEQ ID NO: 14337 - DNA, 201 bp, Homo sapiens
  source 1..201: mol_type = unassigned DNA
tttaacagatatgaaaactgaaggccgggcgcagtggctcaagcctgtaatcccagcactttgggaggccgaggcgggcggatcacgaggtcaggagatcgagaccatcctggctaacacagtgaaaccccgtctctactaaaaatattaaaaattagccgggcgtggtggcgggcgcctgtagtcccagctacttgggag

SEQ ID NO: 14338 - DNA, 201 bp, Homo sapiens
  source 1..201: mol_type = unassigned DNA
ctgaatagctgggactacaggcgcctgccaccgcgcccggctcattttttgtgtgtttttagtagagacggggtttcaccgtgttagccaggatggtctcgatctcctgacctcgtgatccgcccgcctcggcctcccaaagtgctgggattacaggcttgagccaccgcgcccggctaaaacaactaatttttgtgttaa

SEQ ID NO: 14339 - DNA, 201 bp, Homo sapiens
  source 1..201: mol_type = unassigned DNA
acggacccttgcggtgagtgttacagttcttaaaggtggcgtgtccggagtttgttccttctgatgttcggatgtgttcggagtttcttctggtgggttcgtggtcttgccggctcaggagtgaacctgcagacctttgcggtgagtgttacagctcataaaggcagtgtggacccatagagtgaacagcagcaagattta

SEQ ID NO: 14340 - DNA, 201 bp, Homo sapiens
  source 1..201: mol_type = unassigned DNA
tattaaaaataaagaaggaggccgggcgcggtggctcacgcctgtaatcccagcactttgggaggccgaggtgggcggcggatcacgaggtcaggagatcgagaccacggtgaaaccccgtttctattaaaaatacaaaaaattagccgggcgcggtggcgggcgcctgtagtcccagctactgggaaggctgaggcagga

SEQ ID NO: 14341 - DNA, 201 bp, Homo sapiens
  source 1..201: mol_type = unassigned DNA
gtcaagacagcgccattgcactccagcctgggaatagagcgagactccgtctcaaaaaaaaactattgatatacataaatacctgtgaaaccggctgggcgcggtggctcacgcctgtaatcccagcattttggggggccgaggcgggcgtattacaaggtcaggagatcgagaccatcctggctaacacggtgaaacccc

SEQ ID NO: 14342 - DNA, 235 bp, Homo sapiens
  source 1..235: mol_type = unassigned DNA
gtctacagctcccagagagagcgacgcagaagatgggtgatttctgcatttccatctgaggtaccgggttcatctcactagggagtgccagacagtgggcgcaggtcagtgggtgcgcgcaccctgcgtgagccgaagcagggcgaggcattgcctcactccggaagcacaaggggtcagggagttccctttcctagtcaaagaaaggggtgacagacggcacctggaaaattgg

SEQ ID NO: 14343 - DNA, 201 bp, Homo sapiens
  source 1..201: mol_type = unassigned DNA
ccccgagtagctggcgctacaggcgcccaccaccacgctcggctaattttttgtatttttagtagagacagggtttcaccatgttagccaggatggtctcgatctcctgacttcgtgatccgttcgccttggcctcccaaagtgctgggattacaggcatgagtcaccgcggccggccctaatcatgtatctttatctacc

SEQ ID NO: 14344 - DNA, 201 bp, Homo sapiens
  source 1..201: mol_type = unassigned DNA
ctgattatccaggtgcgtctgtcacccctttttttgactcggaaagggaactccctgtccccttgcgcttcccaagtgaggcaatgcctcgccctgcttcggcttgcgcatggtgcacgcacccactgacccgcgcccactgtctggcactccctagtgagatgaacccggtacctcagatggaaatgcagaaatcacctg

SEQ ID NO: 14345 - DNA, 201 bp, Homo sapiens
  source 1..201: mol_type = unassigned DNA
tgggccgctgggtgcccgggctgtcctcctactgcccaggacaaactccacctcgtcccaccggtcgatggcctgccggggagcccgcgggcgagccggcgtctgtaggtgtgttcttctgctgacatgctctccgtgaccagccgcttctgtcttcttccactgatgcgttcctctcgccctccagcagcttctgtctct

SEQ ID NO: 14346 - DNA, 201 bp, Homo sapiens
  source 1..201: mol_type = unassigned DNA
cacctggctcggagggtcctatgcccaccgagtcttgctgattgctagcacagcagtctgagatcaaactgcaaggcagcagcgaggctgggggaggggcgcccgccattgcccaggctcgcttaggtaaacaaagcagccgggaagctcgaactgggtggagcccaccacagctcaaggaggcctgcctgcctctgtagg

SEQ ID NO: 14347 - DNA, 201 bp, Homo sapiens
  source 1..201: mol_type = unassigned DNA
ccgccttgcagtttgatcttagactgctgtgctagcaatcagcgagactctgtgggcgtaggaccctctgagccaggtgccggatataatctccaggtgcgccgttttttaagcccgtcggaaaagcgcagtattctggtgggagtgacccgattttccaggtgccttctgtcacccctttctttgactaggaaagggaac

SEQ ID NO: 14348 - DNA, 201 bp, Homo sapiens
  source 1..201: mol_type = unassigned DNA
agcgacgcagaagacgggtgatttctgcatttccatctgaggtaccgggttcatctcactaagggagtgccagacagtgggcgcaggccagtgggtgcgcgcaccgtgcgcgagccgaagcagggcgaggcattgcctcacctgggaagcacaaggggtcagggagttccctttccgagtcaaagaaaggggtgacggacg

SEQ ID NO: 14349 - DNA, 201 bp, Homo sapiens
  source 1..201: mol_type = unassigned DNA
catcaggacaccctggctgcagagaggagctacccaccgcgagtctcctctgagctgttctattactcagtaaagctcctcttcaccttgctcaccctccgcttgtccacgtacgtcattgttcccgggcgctgaacctgccaaatggtggaggtgaaagagctctaacacaaacagagctgaaacacgccccttgcttgc

SEQ ID NO: 14350 - DNA, 201 bp, Homo sapiens
  source 1..201: mol_type = unassigned DNA
gctggagtgcaatggcatgatcttggctcactgcaacatctgcctcccgggatccagcaattctcctgcctcagcctcccgagtagctgagattacaggcgaccaccaccacgcccggctgatatttgtatttttagtagagacggggtttcaccatgttggccaggctggtctcgaactcctgacctcaggtgatctgcc

SEQ ID NO: 14351 - DNA, 201 bp, Homo sapiens
  source 1..201: mol_type = unassigned DNA
cactgttggcactagcatctggaagaggggaacaccgtggctcctgaaaacttggagccgccagcaactgaggagtcccaaggagtgagacgggggtgtcgttctaccactctctcattcctgcagccggcagctttgttagcggtgggggccgggttgaggggtggtggtatactaggggggtggtggtatatactacag

SEQ ID NO: 14352 - DNA, 201 bp, Homo sapiens
  source 1..201: mol_type = unassigned DNA
gtcttccggcactaccagtatctgggccctctggagcggaagtggctggccggggatatgcagctcacagaggtccagatgaaaacctggtttcaaaaccgccagatgaaacacgaacggcaaatgcaggattcacagctgaacagccccttcttggggtctctccacgcgcccgggctttccactcaccgtcttctggcc

SEQ ID NO: 14353 - DNA, 207 bp, Homo sapiens
  source 1..207: mol_type = unassigned DNA
accagagcagaggggctctctcatcccctgcccagccccctgacctggctctctaccctccaggaaacacattccggcccgaggtccacctgctgccgccgccgtcggaggagctggccctgaacgagctggtgacgctgacgtgcctggcacgtggcttcagccccaaggatgtgctggttcgctggctgcaggggtcacaggagc

SEQ ID NO: 14354 - DNA, 201 bp, Homo sapiens
  source 1..201: mol_type = unassigned DNA
acatcaggggaagaagacacaagcgctggtcatccataggagcaccccagcagaaggacacgctgacaggcacccggaagccagtaggccgtggaccagcgggaggaggcggaggttggcctgggcagtcaggggagagccggggctgccgagcaccccaactccaggggaaaaccatctcccttctggctgccccatggg

SEQ ID NO: 14355 - DNA, 201 bp, Homo sapiens
  source 1..201: mol_type = unassigned DNA
ccgattttccaggtgcgtccgtcacccctttctttgactcggaaagggaactccctgaccccttgcgcttcccaagtgaggcagtgcctcgccctgcttcgcgcacggtgcacgcacccactgacctgcgcccactgtctggcactccctagtgagatgaaaccggtacctcagatggaaatgcagaaatcacccgtcttc

SEQ ID NO: 14356 - DNA, 201 bp, Homo sapiens
  source 1..201: mol_type = unassigned DNA
ccacgccccaggcacaccgacatctccgcactggttccctccaggaggccacgccccaggcacacgggcatctccacactgactccctctagtaggccacgccccaggcacacgggcatctccacactgactccctccgggaggccacgccccaggcacacgggcatctccacactggttccctccaggaggccacgcccc

SEQ ID NO: 14357 - DNA, 201 bp, Homo sapiens
  source 1..201: mol_type = unassigned DNA
gcccctctgcccggccgcccagtctgggaagtgaggagcgcctcttcctggccgtcatcccgtctaggaagtgaggagcgtctctgcccggccacccatcgtctgggatgtggggagcacctctgccaggccgcgaccccatctgggaactgaggagtgtctctgccccgccaccaccccatctgggaggtgaggagcgtc

SEQ ID NO: 14358 - DNA, 201 bp, Homo sapiens
  source 1..201: mol_type = unassigned DNA
gagggagacgcggggcgggaactggggctgctcgcggtaggccagagcaagttctgggtggacatggccttggcgggccccacactccgagcagctggccgccccaccagccccgggcagtgaggggcttaccacccgggacagcagctgtggagggtgcgccgagtcccccagcagtgccagcccgccggcgctgtgctc

SEQ ID NO: 14359 - DNA, 201 bp, Homo sapiens
  source 1..201: mol_type = unassigned DNA
tctgattaaaaataaataaatatggccgggtgcggtggctcaggcctgtaatcccagcatttcgggaggccgaggcggtggatcacaacgtcaggagatcgagaccatcctggctaacacggtgaaaccccatctctactgaaaatacaaaaaattagccgggcgtggtggtgggcacctgtagccccagctactcaggag

SEQ ID NO: 14360 - DNA, 201 bp, Homo sapiens
  source 1..201: mol_type = unassigned DNA
cggccagggggcacccctagacgcacagaagcttcggaggccatggcaagtctgcaaccgggacccgcctctaggctcacacgtgtagctttccagctgcgcaatctccttaaatggagcagctccggcgtgggtggggcccgggccggcagtgggggcggggccggcagtgggggcggggccagtcgggggaggaggggg

SEQ ID NO: 14361 - DNA, 201 bp, Homo sapiens
  source 1..201: mol_type = unassigned DNA
tatggcgaaaccccatctctactaaaaatacaaaaattagttgggcgtggtagtgcacgtctgtaattccagctacttgggaggctgaggcaggattatcgcttgaacccggaaggtggaggttgcagtgaaccaagagagcggttctgcactacagcctgaacgacagagcaagactccatctcaaaataactaactaac

SEQ ID NO: 14362 - DNA, 201 bp, Homo sapiens
  source 1..201: mol_type = unassigned DNA
atcacgcccggctaattttttttttttgtatttttagtagagacggggtttcaccgtgttagccaggatggtctcgatctcctgacctcataatccgcccgcctcggcctcccaaagtgctgggatgacaggtgggagccaccgcgcccggcccaattcagcgttcgatatttgaagacgatctgggtcagaggagaccgc

SEQ ID NO: 14363 - DNA, 201 bp, Homo sapiens
  source 1..201: mol_type = unassigned DNA
agcgagccgccgatgccagcgagatgccaggctggactcagcaagccgccgatgccagccagacgcagagcagagaacgctggtcaaagagcagctaggcggtgtctgctcggccgaagcccagtcccggagaggcaggctctgtaccaggacgtggaggctccggggtcatgaaacccccagggtgagagacaaaggtag

SEQ ID NO: 14364 - DNA, 380 bp, Homo sapiens
  source 1..380: mol_type = unassigned DNA
tttttttttttttttttagacggagtctagctctgtctccatgctgcagggcagtggcgcggtctcggctcactgcaacctccgcctcccgggttcccgcgattctcctgcctcagtctcccgagtagctgggactacaggcacacgccaccacgcccagctaatttttgtttgtttgtttatttatttattattatttttgagacggagtctcgctctgtcatcaggctggagtgccattggagtgcaatggcacgatctcggctcactgcaatctccgcctcccgggttcaagcaattcccctgcttcagcctcccgtgtaactgggactacaggcacgtgccaccacccccagccaattttttgtattttagtagag

SEQ ID NO: 14365 - DNA, 201 bp, Homo sapiens
  source 1..201: mol_type = unassigned DNA
gagtgcaatggcgcgatctcggctcactgcaagctccgcctcccgggttcacgccattctcctgcctcagcctcccaagtagctgggactagaggtgcccgccgccacgcccagctaattttttgtatttttagtagagacggggtttcaccgtattagccaggatggtctcgatctcctgacctcgtgatccgcccgcct

SEQ ID NO: 14366 - DNA, 201 bp, Homo sapiens
  source 1..201: mol_type = unassigned DNA
cacagggtgtcgaaatcaagccacccagggagcccgcagatcccaccctctccggtgagagagtttggtggggagcacttcatccaatgcagggaacagcgttactgcggccttcacctcccggcttcaagtgattcacctgccgcagcctcccaagtagttgggattacaggcgcgtgccaccacgccgggctagttttt

SEQ ID NO: 14367 - DNA, 201 bp, Homo sapiens
  source 1..201: mol_type = unassigned DNA
ttcctcccttgggggctccctcatgcctcatgcagctcatggtgtggggttcattggccctggcggggtggaaggtcccatgccgtcgtcgtctcacgtcgtcggtggtgggggcttgttgggggttgggaggaaggcaaataggaagggtccaccggggagagggtgggggagcacgtcacagtcgccgcagttcgccgt

SEQ ID NO: 14368 - DNA, 201 bp, Homo sapiens
  source 1..201: mol_type = unassigned DNA
tccaggtgcgtccgtcacccctttgactcggaaagggaactccctgaccccttgcgcttcccaagtgaggcaatgcctcaccctgcttcggctcacgcacggtgtgcgcacccactgacctgtgcccactgtctggcactccctagtgagatgaacccggtacctcagatggaaatgcagaaatcacccgtcttctgcgtc

SEQ ID NO: 14369 - DNA, 201 bp, Homo sapiens
  source 1..201: mol_type = unassigned DNA
ggctgtagtgcagtggcgcgatctccgcttactgcaagctcctcctcccgggttcacgccattctcctgcctcagtctctgagtagctgagactacaggcgcccgccaccacacccggctaattttttgtaaaaaatttaaaaaaaaaattaaagataaaatgggttcggcagtatgatactctttatccctaattatttg

SEQ ID NO: 14370 - DNA, 201 bp, Homo sapiens
  source 1..201: mol_type = unassigned DNA
ttctgttttccctaagcgtcggccaggttgagaaataaagggacagagtacaaaagagggaaattttaaagccgggcatccgggggagacatcacatgtcggtaggttctgtgatgcccctgagccgtaaaaccagcaagtttttattagggattttcaaaaggggagggagtgtacgaatagggtgtgggtcacagagat

SEQ ID NO: 14371 - DNA, 201 bp, Homo sapiens
  source 1..201: mol_type = unassigned DNA
agcagtgcccctacaaacaggcgtgaaaaccgagcatgtcttgggctggtcagctgaatcattgcgtgtagagagggagtcctggccgcacaggcacagcggcggattatgtttctacatatgtcgcctgtatagaaaatggagaataagctcctccctgggccgggtttttaagattataacaataagagttcgccaaag

SEQ ID NO: 14372 - DNA, 201 bp, Homo sapiens
  source 1..201: mol_type = unassigned DNA
ccccaggggcctcaaaccggagccttatctccaggacccacaaaactctagacacagccaggacctgccagggagaccagcctcctccggcagcctgggcgctgctgtttccaacacacagtgataacccggaacccatcctcagagttactcagaaacacgctctggagatggtgccttccgaaagacctctactcccaa

SEQ ID NO: 14373 - DNA, 201 bp, Homo sapiens
  source 1..201: mol_type = unassigned DNA
ggatgtctggttatatctgatttctcacctctgggtatggaggtctgtctgcagaggcccgggcccgggcacaaagggagagagaggcctccattgtcccgcaggggccgaaatgcagaccgtgcatccccggtgacctcggggacccttctctgatcatcaggattctcttggactctagggtccttgtcctgctcaggc

SEQ ID NO: 14374 - DNA, 201 bp, Homo sapiens
  source 1..201: mol_type = unassigned DNA
ttagtagagacggggtttcaccgtgttagccaggatggtctcgatctcctgacctcgtgatccgcccgtctcggcctcccaaagtgctgggattacaggcgtgagccaccgcgcccggccacctattttttttaagagatggttgatatgatttcaatcttcttaaatttctgaagacttgttttgtgacctagcatgtga

SEQ ID NO: 14375 - DNA, 568 bp, Homo sapiens
  source 1..568: mol_type = unassigned DNA
aggtggagctgcctgccagtccggcgccgtgtgcccgcactcctcagcccttgggcagtcgatgggactgggcgccgtggaacaggggttggcgctcgtcggggaggcttgggctgcacaggagcgcacggcgggggtggaggctcaggcatggagggctgcaggtcccgagccctgcccggcggggaggcagctaaggcccagcgagaagtcgagcacagcagctgctggcccaggtgctaagctcctcactgcccgggccggctggccgctccgagtgcggggcttgccaagcccacgcccacccggaactcgagctggcccgcaagcgcagcctgcagccacggttcccgcccacgcctctctctccacacctacccgcaagctgagggagccggctccagccttgtccagcccagaaaggggctcccacagtgcagcgacgggctgaagggctcctcaaacgcggccagagtgggcgccaaggccgaggaggtgccgagagggagcgagggctgtgagggctgccagcacgctgtcacctctcatttttgtgtctgtatactaa

SEQ ID NO: 14376 - DNA, 201 bp, Homo sapiens
  source 1..201: mol_type = unassigned DNA
tcttttcttttctttcttttttttctttttttgagacggactcgtgctctgtcgcccaggctggagtgcagcggcgcgatctccgctcactgcaagctccgcctcccgggttcacgccattctcctgcctcagcctcccgagtagctgggactacaggcacccaccatgatgcccagctaattttttgtatttttagtaga

SEQ ID NO: 14377 - DNA, 201 bp, Homo sapiens
  source 1..201: mol_type = unassigned DNA
atcccagagaagcccatgggagccccagggagagttttctttgtgaagggcagggcaccctggaatgggtttgccgagcccgctcccacccggaactcacgcttgcccacaagcgccccacacagccctggttcccacctgcgcctctccctccacacctccccgcaagcagagggagccaactccggccttggccagccc

SEQ ID NO: 14378 - DNA, 201 bp, Homo sapiens
  source 1..201: mol_type = unassigned DNA
ggataaagaaaatgtggtatatggctgggcacggtggctcacgcctgtaatcccggcactttgagaggccaaggcgggcagatcacgaggtcaggagatcgagaccatcctggttaacacgatgaaaccccatctgtactaaaaaatacaaaaaattagccaggcatggtggcgggtgcctgtagtcccagctacttggga

SEQ ID NO: 14379 - DNA, 201 bp, Homo sapiens
  source 1..201: mol_type = unassigned DNA
ctgcactccagcctgggggacagagtgagactccgtctcaaaaaagaaagaaaaaaatgcccctccctccctgttccccctgactcctactctgtcttgcgggctcttcactaacaaccgcccgtgtttgacccgggtgcccctcccatcacaaccttccccccaggtgcatgtccccataacaaagttcaccccatggtt

SEQ ID NO: 14380 - DNA, 201 bp, Homo sapiens
  source 1..201: mol_type = unassigned DNA
ctagccccatccatgcgccactcatggataagggtaatcaccagcagcagtgattatgtgtgtcaggcactcgtaggtcccttcccgttctctgaaccacgtgctacgcccagctcagggatgataaactgaggtgcacgagtaggtgagaagacgaacagtgtacccgggcaaggccgccagcccttttgtgctcctgtg

SEQ ID NO: 14381 - DNA, 201 bp, Homo sapiens
  source 1..201: mol_type = unassigned DNA
ccatcattgatatccacccttcctccacctacagcatccgcatgtacgccaagaaccggattggcaagagcgagcccagcaacgagctcaccatcacggcggacgaggcaggtacgtgggaccgggcggaaccttgctccagaggagcccgggagctaactcttgagggctcagatgcttaaatgcagaagcagacctttg

SEQ ID NO: 14382 - DNA, 201 bp, Homo sapiens
  source 1..201: mol_type = unassigned DNA
gcgggaggcgcgcaagtgacacactgaggggcccaggcagcagcccccatacgctgccaggtcagagcagccccgggccacgtgggtgcccccagctgccgctgtaggcggaggtacgccggttcctcaaggatgtgacagcggctggactttcatgaccactgcttggccaccagagggcaagtcccagggccagccaag

SEQ ID NO: 14383 - DNA, 201 bp, Homo sapiens
  source 1..201: mol_type = unassigned DNA
gggtcggtcccgggccgtctggggtccctgcgacccccacatccacccctctcgcagggtgcggcgctgggctccatggtgggcctcatgacctacgggcggcgccaattccagtccctggacacgacgatgcggcgcctgatcccgcccttccgcgaggcttcggccaagctaaccacgctggtggatgccgacgccgag

SEQ ID NO: 14384 - DNA, 201 bp, Homo sapiens
  source 1..201: mol_type = unassigned DNA
taacattgtttgcaaatgattgaaccggcctctgaccctctcagagaagatcgtgtacagacacccggatgaccccaccagccaggaaattgagcggggcgggacgtacctgcagcagtggccggacagcgtgaccatgcaggatggacggcccagatggccatgctgcagttcatcagcagcaggctcccaaggtgacca

SEQ ID NO: 14385 - DNA, 201 bp, Homo sapiens
  source 1..201: mol_type = unassigned DNA
ccggacagtaaacacgcgtgggtctcccctgtgccggacagtaaacacgcgtgggtctccctgtgccaaacggtaaacacgcgtgggtctctcgtgtgccgaacagtaaacacgcgtgggtctcccctgtgcccgacagtaaacacgcgtgggtctcccgtgtgccggatgataaacacgcatgggtgtcctgtgtgctgg

SEQ ID NO: 14386 - DNA, 201 bp, Homo sapiens
  source 1..201: mol_type = unassigned DNA
gtttcaccatgttggctaggctggtctctctaactcctgacctcgtgatccacccacctcggcctcccaaagtgctgggattacaggagtgagccactgcgcccggccgagattcttatgctattattctatgaagcccttggcacaatgcttgacacacagtaggtacctgataagtggagcttctattgctgttcccct

SEQ ID NO: 14387 - DNA, 201 bp, Homo sapiens
  source 1..201: mol_type = unassigned DNA
gagccaggtgtgggatatagtctcgtggtgcgccgttttttaagcccgccggaaaagcgcagtattcgggtgggagtgacccgattttccaggtgcgtccgtcacccctttctttgactaggaatgggaactccctgacccctcgtgcttcccgagtgaggcaatgcctcgccctgcttcggctcgcgcacggtgcgtgca

SEQ ID NO: 14388 - DNA, 201 bp, Homo sapiens
  source 1..201: mol_type = unassigned DNA
tcctttggagccaactgtgctttcattactttaaatagagcagtcgggaccgggcgctgtgcctcacgcctataatcccagcactttgcgaggccgaggcgggcagatcacgaggtcaggagatcgagaccatcctggctaacatggtgaaaacctgtctccactaaaaatacaaaaaattctccgggcgtggtggcgggc

SEQ ID NO: 14389 - DNA, 201 bp, Homo sapiens
  source 1..201: mol_type = unassigned DNA
ccgacagagtgaaatggcggcggcggccgggatgatgctgctgggcttgctacaggcgggtgggtaggtgctgggccaggcgatggaggaggtggcaggcggcaacctcttgtccatgctgctgatcgcctgcgccttcaccctcagcctggtctacttgttccgtctcgctgccggccacctggtccagctgaccgcagg

SEQ ID NO: 14390 - DNA, 201 bp, Homo sapiens
  source 1..201: mol_type = unassigned DNA
gtgaaaccctgtctctactaaaaataccaaaaaaattagccggcgcggtggcaggcgcctgtagtcccagctactcgcaaagctgaggcaggagaatggcgtgaacccgggaggcggagcttgcagtgagctgagatcgcgcctccgcactctagcctgggtgacagagcgagactctgtctcaaaaaaaaagcagtctgg

SEQ ID NO: 14391 - DNA, 201 bp, Homo sapiens
  source 1..201: mol_type = unassigned DNA
tttttatttttgtttttgagatggagtctcactcttatccaggctggagtgcagtagcatgatctgggctcactgcaatctctgcctcccgggttcagtcgattctcttgcctcagcctcccaagtggctggaattacaggcacacaccaccacacccggcaaatttttttttttttttttttgtatttttagtagactgt

SEQ ID NO: 14392 - DNA, 201 bp, Homo sapiens
  source 1..201: mol_type = unassigned DNA
catggtgaaactccgactctgctaaaaacacaaaaattagccgggcgtggttgtgagcacctgcaatcccagctacttgggaggctgaggcaggagaatcgctagaacccgggaggtggaggttgcagtgagccaagatggcaccactgcactccagcctgggcaatagagtgagactccatctcaaaacaaaaaaaaaca

SEQ ID NO: 14393 - DNA, 201 bp, Homo sapiens
  source 1..201: mol_type = unassigned DNA
acctgctttaaggactggaagaggaaaatcaaaaataccatttgaaaggccggacgcggtggctcacacttgtaatcctagcactttgggaggccaaggcgggcggatcacgaggtcaggagttcgagaccagcctggccaacacaatgaaaccccgtctctactaaaaatacaaaaattagctgggcttggtggcaggca

SEQ ID NO: 14394 - DNA, 201 bp, Homo sapiens
  source 1..201: mol_type = unassigned DNA
tgcagtggcacaacctctgctcctgcaacctccccctcccggcttcaagcgattctcgcgcctcagctcccaagtagctgggattacaggctcgagccccgcccggctaattttttccatatttttagtagagatggggtttcaccatgttggccaggctggtctcgaactcctgacctcaagtgatccgcccaccttggc

SEQ ID NO: 14395 - DNA, 201 bp, Homo sapiens
  source 1..201: mol_type = unassigned DNA
aacacgggtggctccgcgcaggacgggggccccagggccgcttgagccggaggacagcccgcagtctccaccgtctgcagttgaagtgtgttgtgagatcgctgcaggggcccgggccacctctgccttgggggaccctaaaaagctgagccacacccatgttgaaacttccactgaggataatcacgcaccatacagacc

SEQ ID NO: 14396 - DNA, 201 bp, Homo sapiens
  source 1..201: mol_type = unassigned DNA
agcctccgctgaccccagcacgagccgctcatacacattcaaggccggcagcacagcggcatatgtggcaaaaccgagcaggcgtggatgggaagggagcgcatcagcctgcgtgtgaaggccacatctaggggcggagggaggggagaaacacctctgccgtatctgcagtgtttcacttctctcagtaacccaaaacgc

SEQ ID NO: 14397 - DNA, 234 bp, Homo sapiens
  source 1..234: mol_type = unassigned DNA
ccctgctgacgcagtgcccgccgccgttcctggatgacttcagtggtgaagtggtgcaccatgtcacaggcctgccggaacctccgcccatccgccgagcggtagtaaatgaagtcgaggtagtggtgcaagcgatactggcgccggacagacagagcgctcagttcaatgatagcggagatataatcactcatcttcctgccaaggagaaggggatccatgagtgtagcccct

SEQ ID NO: 14398 - DNA, 201 bp, Homo sapiens
  source 1..201: mol_type = unassigned DNA
cagctttctcatctgtgcagtgggcgcaatgtcgatgactgcctccgggaagtcagacggtgtctgggaggcgctgagctggggctgacacagagcgagcgctccgtgaagtacctgggtcctgtgatgtttccaagtctacagacgcatcacgccatgaggaacacacctgggctggcgatgctggagacaagggacccc

SEQ ID NO: 14399 - DNA, 201 bp, Homo sapiens
  source 1..201: mol_type = unassigned DNA
cagtgagcacagaccgcgccactgcactgcagcctgggtgacagaagtgaaaagaaacactgtctcaaaaaaaaaacaggagggaggagccaagatggccgaataggaacagctccggtctacagctcccagcgtgagcgacgcagaagacgggtgatttctgcatttccatctgaggtaccgggttcatctcactaggga

SEQ ID NO: 14400 - DNA, 201 bp, Homo sapiens
  source 1..201: mol_type = unassigned DNA
gatgaaaccccgtctctactaaaaatacaaaaatttagccgggcgtggtggcggacgcctgtagtcccagttattcaggaggctgaggcaggcgaatggcgtgaacccgggaggcggagcttgcagtgagccgagattgcgccactgcactccagcctgggcgacagagcgagactctgtctcaaaaacaaaataaaatta

SEQ ID NO: 14401 - DNA, 201 bp, Homo sapiens
  source 1..201: mol_type = unassigned DNA
gtgagtgtggggtccagctggctgttccaagcaccggtacacaggcaggttctaggcagggcttgcagctggaccaggcatgtcaccccgaagggaatgcggtggcaccccaagaggggtgctcagaccttgaagccccggaaggggcgattctacttgctaattagctcttttagttctgccatccgcagccctagggat

SEQ ID NO: 14402 - DNA, 201 bp, Homo sapiens
  source 1..201: mol_type = unassigned DNA
gtgcggctccttagccagggcagctcgaaatccaggaacgctccaaggtcatcctgtgggaactgtggcgccagggcccctgaacaccctcctgtcctccgagtcgagtcgctccatctgcctcctaaacgggcttcgggaggaaggcccgcgtgtctcctcaaggtgaggagctactgatgtaaactccctgcaaggacc

SEQ ID NO: 14403 - DNA, 201 bp, Homo sapiens
  source 1..201: mol_type = unassigned DNA
ggggacccagctcacgtgtgtgggggccgtgcgtgtccgtttcgcctgttcatgtatgtcacacatgtgagagtccacagcgagggcagcctttacacgcgatggcccagaggagcgagcatctcaggctcctcagcacgtctctgtgctgacctcctgcagcactgccgggagccatgtgagtgtccacgcctgtgtgtg

SEQ ID NO: 14404 - DNA, 201 bp, Homo sapiens
  source 1..201: mol_type = unassigned DNA
tccatccgcctttcgtctccctccctgctggatctgaggcgccgctcccgccgcgctgtcctcgcgccatgccacgtcacgtcacgtcacgtcacgttacgttcccacgtcacgtccacgtcacgttcccacttcccgtccacagggaaacgggccccggcgatgtgagggcgtctgccgtgcttggtgccttcacagggg

SEQ ID NO: 14405 - DNA, 201 bp, Homo sapiens
  source 1..201: mol_type = unassigned DNA
agttcttaaagcctcaactccttcttttttttttttttttctttttttttttttttgagccggagtctcactctgttgccaggctggagtgcagtggcgcgatctcagctcactgcaacctctgcgtcccgggttcaagggattctcctgcctcagcctcctgagtagctgagactgcaggcacgtgccaccacgcccagc

SEQ ID NO: 14406 - DNA, 201 bp, Homo sapiens
  source 1..201: mol_type = unassigned DNA
ttgtaggacagccctaaaaaggaaggctatcttttttctgtctaccaccgtagtttgctaaccaatcagaaggcaggcgctgagacagtaacaaccagccgacagttgcggaggactgccgggactcccacagagctcgacaagtgggatcacagtcatcaccagccactgagaagagtgtcccctacccacagagtgcaa

SEQ ID NO: 14407 - DNA, 201 bp, Homo sapiens
  source 1..201: mol_type = unassigned DNA
tcaaactcccagagggcttactgtaagattctccccgggcctgaaagcttaagatgaataactcctcccttttcaggcccagtcccaaggcgcaacttgcgccagcagggtgcgccagcagggtgcgccagcagggtgcgccagcagggtgcgccagcagggtgcgccagcagggtgcgccagcagggtgcgccagcaggg

SEQ ID NO: 14408 - DNA, 686 bp, Homo sapiens
  source 1..686: mol_type = unassigned DNA
atcatgcctcagccttcctggccgctctcacctccaaacacccgaaaaacagaggcgctgggtgcgaggcggagagatgcacaggtctggtcccggccccgccctttgcctgttctaaagggcaaggtctctccgcctcgcgccccgcctctgtcccacccaggccccgccaccatgttcgggggccccacccgggactggcttctgtcctgcgcagcaaacccggaagtggatcacgtggagtaaaggtcctaccgaggcgcgtgagttttgctctgccttgtattaagtctgcacttcccaggtccctggcacttctgtccctgggacgtggggtcctcacagacctggaaattcttgcctgtcttccttcacccagagcaaattgagacgcccataagagtctggaagttgcttccttttgggtttgaagtcgcttggaggctggtcccgtccccggtctttctgctatagggcaatgtatacacttcctatcgcatagttttcctgctcaaaaccttgttgactcatcctgccccttgctttttaaagtcctcacccgtgcgctggattcccgccctgggcgcctcccagcccccgtcggcctcccctggagcgcagcgccggggccccagtcctggggaggctgggtcctctgcctggtcctgggagcctgcaggtgccac

SEQ ID NO: 14409 - DNA, 201 bp, Homo sapiens
  source 1..201: mol_type = unassigned DNA
aggctggcagatcacgaggtcaggagatcgagaccgtcctggctaatatggtgaaaccccgtctctactaaaaatacaaaaactagccgggcgtggcggcgtgcccctgtcccagctgctggggaggctgaggcaggagaatggcgtgaacccgggaggcggagcttgcagtgagccgagatcgcaccactgcactctagc

SEQ ID NO: 14410 - DNA, 201 bp, Homo sapiens
  source 1..201: mol_type = unassigned DNA
cactgcaagctccgccttccgggttcacgccgttctgctgatctcgtgatccgccccgcctcggcctcccaaagtgctgggattacaggcgtgagccaccgcgcccggccaacagttttcaatattaattattcagagtgtgtaataacttggaaaagggctttttttttcttttttgcttttagagacagggtctctggc

SEQ ID NO: 14411 - DNA, 201 bp, Homo sapiens
  source 1..201: mol_type = unassigned DNA
tgggagtgacccgattttcaaggtgcgtccgtcacccctttctttgactcagaaagggaactccctgaccccttgcgcttcccaagtgaggcagtgcctcgccctgcttcggctcgcacacggtgcacgcacccactgacctgcgcccactgtctggcactccctagtgagatgaacccggtacctcagatggaaatgcag

SEQ ID NO: 14412 - DNA, 201 bp, Homo sapiens
  source 1..201: mol_type = unassigned DNA
attccataaaaatgaaaattaaataagtacaagaatggttatatccgggggaggagccaacatggccgaataggaacagctccggtctacagctcccagcgtgagcgacacagaagatggtgatttctgcatttccaactgaggtaccgggttcatctcactagggactgccagacagtgggcgcaggtcagtgggtgcgt

SEQ ID NO: 14413 - DNA, 201 bp, Homo sapiens
  source 1..201: mol_type = unassigned DNA
cggggtttcaccctgttagccaggatggtctcgatctcctgacctcgtggtccgcctgcctcggcctcccaaagtgctgggattacagacctgaaccaccgcgccgggccagttctgtgggtttctaacgtgctttcttccacttgtaatttagagtcagaagaggctagcgctgacaggcaggcagtagtcacatgaaaa

SEQ ID NO: 14414 - DNA, 201 bp, Homo sapiens
  source 1..201: mol_type = unassigned DNA
ctactaaaaatacaaaaaattagccgggcgtggtggtgggcgcctgtaatcccagctactcgggaggctgaggcagaagaatggcatgaacccaagaggcggagcttgcagtgagccgggatagcgccactgcagtccagcttgggcgaaagagtgagactccgtctcaaaaaaaaaaaaaaaaaaaaaaaaaaaagactt

SEQ ID NO: 14415 - DNA, 201 bp, Homo sapiens
  source 1..201: mol_type = unassigned DNA
ggagggtggtgagggtggggagggggaaggcgggaggccgggttcggtgcatgggggccgggcacactttctctgggcatccctaggacaggcgaggaacgcatcggccgggactccacctacgagcaggagggcaaggtgcagtttgtgattgatgcggtgtacgccattgcccacgccctccacagcatgcaccaggcg

SEQ ID NO: 14416 - DNA, 201 bp, Homo sapiens
  source 1..201: mol_type = unassigned DNA
ctacacaagtcgtagtctgggcagacgctgcacttgtagcgggttcctaccacaggcccattgcagccatcgcagatcacattggggtgcaccatgttgcggggcgcctcctgagcacacggtgggcggtggtcccgccggcactcttttttctctacaggaagggtaaagagagccgctagggtgggaccccctaaagtc

SEQ ID NO: 14417 - DNA, 201 bp, Homo sapiens
  source 1..201: mol_type = unassigned DNA
tatggggaaaccctgtctctactaaaaatacaaaaattagcccggcgtggtggcacataactgtaaccccagctactcgggaggctgaggcaggagaatcgctggaacccgggaggcggagcctgcagtgagccaagattgcgccatgcactccaacctgggcgtcgcagcgagactctgtctctaaataaataaagtgcc

SEQ ID NO: 14418 - DNA, 201 bp, Homo sapiens
  source 1..201: mol_type = unassigned DNA
agcaatcaacaaagtgaagacatggcccactgaagcgcagaaaatatttacaagccgggcgcggtagctcacgcctgtaatcccagcactttgggaggccgagacacgcggatcacaaggtcaggagatcgagaccatcctggctaacacagtgaaaccctgtctctactacaaatagaaaaaattagttgggcatggtgg

SEQ ID NO: 14419 - DNA, 227 bp, Homo sapiens
  source 1..227: mol_type = unassigned DNA
agattggcttctttcacttaataatatgcatttcaatttctagggctgggcgtggtggctcacgcctgtaatcccagcactttgggaggccgaggccggcggatcacgaggtcaggagatcaagacgatcctggctaacatggtgaaaccccgtctctactaaaaatacagaaaataagccgggcgtggtggcgggcacctgtagttccagctactcaggaggctga

SEQ ID NO: 14420 - DNA, 201 bp, Homo sapiens
  source 1..201: mol_type = unassigned DNA
gttccctttccgagtcaaagaaaggggtgacggacgcacctggaaaatcgggtcactcccacccgaatattgcgcttttccgaccggcttaaaaaacggcgcaccacgagattatatcccacacctggctcggagtctcgctgattgctagcacagcagtctgagatcaaactgcaaggtggcagcaaggctgggggaggg

SEQ ID NO: 14421 - DNA, 201 bp, Homo sapiens
  source 1..201: mol_type = unassigned DNA
acgcagaagacgggtgatttctgcatttccatctgaggtaccgggttcatctcacttgggagagccagacagtgggcgcaggtcagtgggggcatgcaccgtgcgcgagccgaagcagggagaggcattgcctcacttgggaagcgcaaggggtcagggagttccctttccgagtcaaagaaaggggtgacagacgcacct

SEQ ID NO: 14422 - DNA, 201 bp, Homo sapiens
  source 1..201: mol_type = unassigned DNA
ggcacccgccaccacgcccggctaattttttgtattcacagtacagacggggtttcaccgtgttagccaggatggtttcgatctcctgacctcgtgatccgcccgcctctgcctcccaaagtgctgggattacaggcgtgagccaccgcgcccggtggaaaggacacttttttacagtatgagcactgaaacaaaaaggca

SEQ ID NO: 14423 - DNA, 201 bp, Homo sapiens
  source 1..201: mol_type = unassigned DNA
aaccgtgtcactggaagttaggaagcaaacttcaatcctagtattgtttttttttgaaatggagtctcgctctgtcacccaggctggagtgcagtggcgcgatctcggctcactgcaagctccgcctcccgggttcaccccattctcctgcctcagcctcccgagtagctgggactacaggtgcccgccaccacgcccggc

SEQ ID NO: 14424 - DNA, 201 bp, Homo sapiens
  source 1..201: mol_type = unassigned DNA
tctgggtgaccgtctgcaatggagggagtgtgtgggctggtttgccagcggagagatttgcctcacgtcaccaggagcctggccgagcaccacggtgaccgtggccgggtggaaggagatggacgcccacttgtgcaatttgcttccattctttctccaggggccatttcagaataaaatgtaatggccctttcttgttca

SEQ ID NO: 14425 - DNA, 201 bp, Homo sapiens
  source 1..201: mol_type = unassigned DNA
acaagctggctgcccggcaggccacaccggggtctctaagagcttgggctgcagacgaatccaggtctgcccctctcaatcagtgtgactcgggcaagccgcgtcccccctctgagcctcagtctcctcatctctcaaatgggggtgacgccatccccactgccaggggttcctctgagcgggtcacaggaaggtgcttag

SEQ ID NO: 14426 - DNA, 201 bp, Homo sapiens
  source 1..201: mol_type = unassigned DNA
cccagcctgggatcggcagtaccttcacctgcacgccatcctcagggacggcaatactgctcaccttgagcccagagcagctactatccccggcccctccgctggctttctgggaggtcccaggaagacgtgacctcttgtcaggcactcgtgggctcccccatagctgccggggtggttcttgcccctccaaaatcacac

SEQ ID NO: 14427 - DNA, 201 bp, Homo sapiens
  source 1..201: mol_type = unassigned DNA
aaagctaccgtaggtaatcagaaaagttgcttccattccatggctgtgtccacctgcggtagacaggataatggcccaaagatgtctgagacccgtgaccgtcttaccctgtgaccgtattaccccacatggcaaagaagcctctgtacgtgtgactacgattaaggaccttgagattcggagatgacctgggtatccggg

SEQ ID NO: 14428 - DNA, 201 bp, Homo sapiens
  source 1..201: mol_type = unassigned DNA
gtggcggcaggtttgctgcgctcgtcccagccagggcccagagtccctcggccagtttatcgcatctggaccccagatgggcgcgttgggtggtgcccgcgccagggaaagagctggcggctggctgagttgctgcgttcctgagcgctgtgcccgttgtgaccattggcgtggctgtctcccggcaggctcgaaggaatc

SEQ ID NO: 14429 - DNA, 201 bp, Homo sapiens
  source 1..201: mol_type = unassigned DNA
cccccgacatcctgcctctacactgcaccatccgccggcaaccgctcccggacagcggccaggccgcggggaggctggtcctggagcccatccccggggcgcacatctccgtcaacttctccgaggtggggcacaggaccgtggtgctgcaccacggggacctgctctccctggggctctactacctgctgctattcaagg

SEQ ID NO: 14430 - DNA, 201 bp, Homo sapiens
  source 1..201: mol_type = unassigned DNA
gggttcagaggcacttcagcaaatggtttaggaactgcagcattaatttatactgagaaatagaactgctacttaagaaagataactgccggcccaatgcggtggctcacgcctgtaatcccagcactttgggaggccgaggctggcggatcacgaggtcaggagatcgagaccatcctggctaacagggtgaaaccctgt

SEQ ID NO: 14431 - DNA, 201 bp, Homo sapiens
  source 1..201: mol_type = unassigned DNA
cacggtgaaaccctgtctctactaaaaatacaaaaaattagccaggtgtggaggcactccctgtaatcccagatactcaggaggctgaggcaggaaaatcgcttgaacccgggaggtggagtttgcagtgagctgatatcgcaccactgtgctccagcctgggcaacagagcaaaattctgtctcaaaaaaaaaaaaaaaa

SEQ ID NO: 14432 - DNA, 201 bp, Homo sapiens
  source 1..201: mol_type = unassigned DNA
cattctcctgcctcagccttaggagtagctgggactacaggcgtccgccacaacgcccggctaattttttttgtatttttagtggagacggggtttcaccgtgctagccaggatggtctcgatttcctgacctcgtgatctacccgcctcagcctcccaaagtgctgggattacaggtgtgagccaccgcgcccagctgtt

SEQ ID NO: 14433 - DNA, 201 bp, Homo sapiens
  source 1..201: mol_type = unassigned DNA
gtctacagctcccagcgtgagcgatgcagaagacgggtgatttctgcatttccatctgaggtaccgggttcatctcactagggagggccagacagtgggcgcaggtcagtgggtgcgcgcaccgtgcgccagccaaagcagggcaaggcattgcctcacttgggaagcgcaaggggtcagggagttccctttccgagtcaa

SEQ ID NO: 14434 - DNA, 201 bp, Homo sapiens
  source 1..201: mol_type = unassigned DNA
tggcaaaaccccatctctactaaaaatacaaagacttagtatgggcatggtggtgcacacctgcaatcccagctgcttgggaggctgaagcagaagaatcgcgtgaacccgggaggcagaagttgcagtgagccaagatcacgccactgcactccagcctgggtgacacaacgagattctgtctaaaaaacaaaataaaaa

SEQ ID NO: 14435 - DNA, 201 bp, Homo sapiens
  source 1..201: mol_type = unassigned DNA
aaatcttctatttctttgaggcagagtctcactctgtcgcccaggctggagtgcagtagcgtgatctcggttcactgcaagctccacctcccgggttcacgccattctcctgcctcagcctcctgagtagctgcgactacaggtgcccttcaccacgccgggctaattttttgtatttttagtagagacggggtttcactg

SEQ ID NO: 14436 - DNA, 201 bp, Homo sapiens
  source 1..201: mol_type = unassigned DNA
tcccgagtagctgggactacaggcgcccgccactacgcccggctaatattttgtatttttagtagagacggggtttcaccgcgttagccaggatggtctcgatctcctgacctcgtgatctgcctgcttcggcctcccaaagtgctgggattacaggcgtgagccaccgcgcccggcttattttttttatttttcacagag

SEQ ID NO: 14437 - DNA, 201 bp, Homo sapiens
  source 1..201: mol_type = unassigned DNA
tgagccgagcggagattgcgccactgctctccagcctgggtgacagagggagaccctgtgtctaaaaaaaatagatgcaggtaggagcttttcttccggcgctcatactcagactgaagaaagtaattgggctgggcccggtggctcagatctgtaattccagcactttgggaggcccaggcagacgtatcactttagctc

SEQ ID NO: 14438 - DNA, 201 bp, Homo sapiens
  source 1..201: mol_type = unassigned DNA
ctggagcagtggcaggtggcaagggctgggtggggggttgccccactgggctctctatttttctctccttcccccaactttttttttttttttttgagacggagtcttgctctgccactcaggctggagtaaagaggtatgatctcggctcacagcaacctctgcctcccgggttcaagtgactctcctgcctcatgctcc

SEQ ID NO: 14439 - DNA, 201 bp, Homo sapiens
  source 1..201: mol_type = unassigned DNA
tgaagggagggacgagagtcctaccatctaaccccaagcctagtggccggtgtccctggaagtggagacacatgctcactggtgtgcgactcacacttacgaaagggaacgtgccctctggaacacaggggagccctggtcagggaagccgtctttccacccaagagggacaaaggtgtgcaaatcccagaaaccagatat

SEQ ID NO: 14440 - DNA, 201 bp, Homo sapiens
  source 1..201: mol_type = unassigned DNA
aaatcatctctgatttgagatataaaaataaagaggccgggcgcaaggtggctcacgcctgtaatcccagcactttgggaggccgaggcgggcggatcacgaggtcagcagatcgagaccatcctggctaatacggtgaaaccccgtctctactaaacaaaacacaaaaaattagccgggcgtggtggcgggcgcctgtag

SEQ ID NO: 14441 - DNA, 217 bp, Homo sapiens
  source 1..217: mol_type = unassigned DNA
ttttgaatgaaattaggaaggagaaagtatgggacaatgggcttttgataatgataaaaagagaaaaaacaaatagaaaaaagaggagggtcggccgggcgcggtcaggaaggcgcggtctcggtcaggagatcgagaccatcctggctaacgcggtgaagccccgtctctactaaaaatacaaaaaattagccgggcgtggtggggggcgcctgta

SEQ ID NO: 14442 - DNA, 217 bp, Homo sapiens
  source 1..217: mol_type = unassigned DNA
ccgtcacccctttctttgactgggaaagggaactccctgaccccttgcccttcccaagtgaggcagtgcctcgccctgcttcggctcgcgcacggtgcacgcactcactgacctgcgcccactgtctggcactccctagtgagatgaacccggtacctcagatggaaatgcagaaatcacccgtcttctgcgtcgctcaagctgggagctgtagacc

SEQ ID NO: 14443 - DNA, 201 bp, Homo sapiens
  source 1..201: mol_type = unassigned DNA
tgctggtgggagttaaaatggatcaactacataaaaaacaatttccaggccgggcgcagtggctcacgcctgtaatcccggcactttgggaggccaaggcgggcggatcacgaggtcaggaaatcgacaccatcctggttaacaaggtgaaaccccatctctactaaaaatacaaaaatttagccgggcgtggtggcgggc

SEQ ID NO: 14444 - DNA, 201 bp, Homo sapiens
  source 1..201: mol_type = unassigned DNA
tggagatttcccacttattgtggcagcaaacccgtctgaggtgcctgcatgtctcagtcccggggctccgggggccgtgcccacagcctccccatctttcggctcccacgtcagggttcccggtccacaccgtgctgttctgcctcatatgagaccggaaagtcacatgtggataattcaggacttattcagggtcatata

SEQ ID NO: 14445 - DNA, 201 bp, Homo sapiens
  source 1..201: mol_type = unassigned DNA
gtagggtccgaacctcttccccaggagggccagggttgcggccgggcgacgccaggtggggaagacactagaagaggagaaaaccaggagcgcaggacgcggtgggagactgggaggctgcagagaggaggcctgaggacaggagggaaggaggcggggacagaggccgagggctggaggggctgccgggtcttctctggg

SEQ ID NO: 14446 - DNA, 201 bp, Homo sapiens
  source 1..201: mol_type = unassigned DNA
gccaccgcgcccggctaatttttttgtatttttttagtagagtcggggtttcaccgtgttagccaggatggtcacgatctcctgaccttgtgatccggccgcctcggcctcccaaagtgctgggattacaggcgttaagccaccgcgcccggccgatagtcagactcttaaaggtgtttgaatttttccaatgtggaaaca

SEQ ID NO: 14447 - DNA, 201 bp, Homo sapiens
  source 1..201: mol_type = unassigned DNA
agctcacgcacggtgcgcgcacccactgacctgcacccactgtctggcactccctagtgagatgaacccggtacctcagatggaaatacagaaatcacccgtcttctgcgtcgctcacagtgggagctgtagaccggagctgttcctattcggccatcttggctcgatccggagtggcacacgcttctaaacaaccaaatc

SEQ ID NO: 14448 - DNA, 201 bp, Homo sapiens
  source 1..201: mol_type = unassigned DNA
ctggcgagaagtcgagcacagcagctgctggcccaggtgctaagcccctcactgcccggggctgctggccgctccaagtgcgggccagcccagcccacgcgcacccggaagtcgcgctggtgagggagggctgcgagggctgccagcatgctatcacctctcactgggattacaggcgtgagccacggcgcccggccgaag

SEQ ID NO: 14449 - DNA, 201 bp, Homo sapiens
  source 1..201: mol_type = unassigned DNA
tcacgccattcttctgcctcagcctgtagctgggactacaggtgcccgccaccacgcccggctactttttctgtatttttaatagagacggggtttcaccgtgttagccaggatggtctcaatctgctgatctcgtgatccgcccgcctcggcctcccaaagttctgggattgcaggagtgagccaccgcgcccggccgca

SEQ ID NO: 14450 - DNA, 201 bp, Homo sapiens
  source 1..201: mol_type = unassigned DNA
cagactggagtgcagtggcacgacctcggcttagaacctccgcctcatgggttcaagcaattcccctgcctcagcctccggagtagctgggactacaggcgcccgccaccacgccaggctaattttttgtatttttagtagggacggctgaccgggcgcggtggctcacgcctgtaaccccagcactttgggaggccgagg

SEQ ID NO: 14451 - DNA, 201 bp, Homo sapiens
  source 1..201: mol_type = unassigned DNA
cacttcccagatgggatagcggccgggaagaggcgctcctcacttcctagatgggatggcggccaggcagagacgctcctcacttctcagacggggtggcggccgggcagaggctgcaatctcggcactttgggaggccaaggcaggctgctgggaggtgaaggttgtagcgagccgagatcacgccactgcactccagcc

SEQ ID NO: 14452 - DNA, 201 bp, Homo sapiens
  source 1..201: mol_type = unassigned DNA
gatggagctgcctgccagtcccggtactgtgcgcccgcactcctcagcccttgggtggtcaatgggactgggtgccgtggagcagggggtggcgctcgtcggggaggctcgggccgcacaggagcccacggaaggggtgggaggctcaggcatggcgggctgcaggtcccgagccctgccccgcgggaaggcagctaaggc

SEQ ID NO: 14453 - DNA, 286 bp, Homo sapiens
  source 1..286: mol_type = unassigned DNA
gagccaggtgtgggatatagtctcgtggtgcaccgttttttaagccggtctgaaaagcgcaataatcgggtgggagtgacccgattttccaggtgcgtccgtcacccatttatttgactcggaaagggaactctctgaccccttgcgcttcccaggtgaggcaatgcctcgccctgcttcggctcgcgcacggtgcgcgcacccactggcctgcgcccactgtctggcactccctagtgagatgaacccggtacctcagatggaaatgcagaaatcacccgtcttc

SEQ ID NO: 14454 - DNA, 201 bp, Homo sapiens
  source 1..201: mol_type = unassigned DNA
aggcaaagctgcctgccagtcccatgccttgtgcccacgctcctcagccgttccacagtcgatgggaccgggtgccatggagcagggggcggtgctcgtcggggaggctcctgctgcacaggagcctagggcagtggggggaggctcacacatggcaggctgcaggtcccaagccctgccccgcagggaggcagctgaggc

SEQ ID NO: 14455 - DNA, 201 bp, Homo sapiens
  source 1..201: mol_type = unassigned DNA
aggcgggtggatcacgaggtcaggggttcgagacgagcctggccaacatggtgaaactccgtctctactaaaaatacaaaaattagttgggcgtggaggcgcgcgcctgtaatcccagatactcgggaggctgaggcaagagaatcgcctgaacccgggaggcggaggttgcagtgagccgagatggtgccattgcactcc

SEQ ID NO: 14456 - DNA, 201 bp, Homo sapiens
  source 1..201: mol_type = unassigned DNA
gagcgacgcagaagacgggtgatttctgcatttccatctgaggtaccgggttcatctcactagggagtgccagacagtgggcgcaggtcagtgggtgtgcgcaatgtgcgcgagccgaagcagggcgaggcattgcctcactcgggaagcgcaaggggtcagggagttccctttccgagtcaaaggaaggggtgacggagg

SEQ ID NO: 14457 - DNA, 201 bp, Homo sapiens
  source 1..201: mol_type = unassigned DNA
gtgccgtctgtcacccctttctttgactaggaaagggaactccctgaccccctgcgcttccggagtgaggcaatgcctcgccctgcttcagctcgcacacggtgcatgcacccacggacctgcgcccactgtctggcactccctagtgagatgaacccggtacctcagatggaaatgcagaaatcacccgtcttctgcgtc

SEQ ID NO: 14458 - DNA, 201 bp, Homo sapiens
  source 1..201: mol_type = unassigned DNA
atcttcatttgaattctgacagcagctactatgtagagctgttaaaatgtatacttccggccgggtgcggtggctcacgcctgtaatcccagcactttgcggggccgaggcgggcggatcacgaggtcaagagatcaagactatcctggccaacatggtgaaaccctgtctctattaaaaatataaaaaaaattagctggg

SEQ ID NO: 14459 - DNA, 201 bp, Homo sapiens
  source 1..201: mol_type = unassigned DNA
ccaggtgccatccgtcacccctttccctgactcagaaagggaactccctgaccccttgcgcttcccaggtgaggcaatgcctcgccctgcttcggctcgcgcacggtgcgcacacacactggcctgcgcccactgtctggcactccctagtgagatgaacccggtacctcagatggaaatgcagaaatcacccgtcttctg

SEQ ID NO: 14460 - DNA, 201 bp, Homo sapiens
  source 1..201: mol_type = unassigned DNA
ttcagcccaccgctgcactgtgagagcccctttctgggctggccaaggccagagcccgctccctcagcttgcagggaggtgtggatggagaggcgtgagcgggaacccaggctgtgcatggtgcttgcgggccagctggagttccgggtgggcgtgggcttggcaggccccgcactgggagcagccggccggccctgccag

SEQ ID NO: 14461 - DNA, 201 bp, Homo sapiens
  source 1..201: mol_type = unassigned DNA
ggggagagggactgaccccttgtgctccacccccagctcatccaaccccagtgcagcctggagactgccaccgtgccccccggagggcgatggagcctccgctctgctcaggagcagcctggcttccgggagggcagcctgactcccacggcactgccggtgacccctcagctcaggccccggggctgcgagaatctcaag

SEQ ID NO: 14462 - DNA, 201 bp, Homo sapiens
  source 1..201: mol_type = unassigned DNA
atgagcgtcaccgacggcagagtcgccttctccatgttctgtggggaccgggaagagaccgcagggagtgaggcaccccactcgcccactcggcagacccgaagactgagacccgagagcccgcagccccgggtcacacccccagcgtttggcccagcccctcctccacctccccacccgccccctgcagacgaggggttt

SEQ ID NO: 14463 - DNA, 201 bp, Homo sapiens
  source 1..201: mol_type = unassigned DNA
gttgtaactttactgagtgtgcctgtctaccagacacctgatcttgcaagactgctttttttttttttttttgacggagtctcgctctgtcgcccaggccgaagtgcagtggcgcgatctcggctcactgcaagctccgcctcccgggttcatgccattctcctgcctcagcctcccgagtagctgggactacaggcgccc

SEQ ID NO: 14464 - DNA, 210 bp, Homo sapiens
  source 1..210: mol_type = unassigned DNA
ttctgggttcccacttcttttttttttttttttttttttctgagacgaagtctcactctgtcgcccgggctggagtgctgtggcaggatctcggctcaccgcaagctccgcctcccggattcacgccattctcctgcctcagcctcccgagcagctgggactagaggcgcccgccaccgcgccaggctaatttttttgtatttttagtag

SEQ ID NO: 14465 - DNA, 201 bp, Homo sapiens
  source 1..201: mol_type = unassigned DNA
caagctgggcgcggtggctcacgcctgtaatcccagcactttgggaggcccaggcaggcggatcacgaggtcaggagatcaagaccatcctggctaacacggtgagaaccccgtctctataaaaaatacaaaaaattagccgggtgcctgtagtcccagctactcgggaggctgaggcgagagaatggcgtgaacccgggg

SEQ ID NO: 14466 - DNA, 201 bp, Homo sapiens
  source 1..201: mol_type = unassigned DNA
gggttaaagaggaatcggaaagggcccggggtagacgtgggcgccacagggtgagccgggccaggctgagaggactcacgggctatgggagcttgtgggcgacggtccggcaggggcctgcggcgggaacagggacaaaatatacttaataaattgcccatttagagcaagttgtgtgggtacaatggcgagaaaacggtc

SEQ ID NO: 14467 - DNA, 201 bp, Homo sapiens
  source 1..201: mol_type = unassigned DNA
ggcgggtgggtcacgaagtcaggagatcgagaccatcctggctaatatggtgaaaccccatctctactaaaaatacaaaaaattagcctggcacagtggcgggcgcctgtagtcccagctagcccggaggctgaggcaggagaatggcgtgaacccgggaggcggagcttgcagtgagccgagattgcgccactgcactac

SEQ ID NO: 14468 - DNA, 201 bp, Homo sapiens
  source 1..201: mol_type = unassigned DNA
gttcatgccatcctaacagtgggtttttccccggtgagaactggccaacagtcattgcctcgcctctttagtatgttgtttgaccagagagggacagggcggggaggaaaaccggggcgccgtgggctgcagttccagctgcaaatacgggagtttcttccgacgtctgtggcccgccggctcgaaagggagaaacacgga

SEQ ID NO: 14469 - DNA, 201 bp, Homo sapiens
  source 1..201: mol_type = unassigned DNA
tcatgaactcctgagctcaagtgatccccccacctggccttgcgaagtgctgggattacatgtgtgagccaccacgtcgggattacaggtgtgagccaccgcgccgggattatgggcatgagccactgcgccggcctctagtaaacattttatcagtatccagtgaattctgggtctttgtggaacaggaatgtttgttcc

SEQ ID NO: 14470 - DNA, 201 bp, Homo sapiens
  source 1..201: mol_type = unassigned DNA
aggctgaggctggtggatcacaaggtcaggagatcgagaccatcctggctaacatggtgaaaccccgtctttactaaaaatacaaaaaaattagccgggcgtggtggtgtgcacctgtagtcccagctactcgggagcctgaggcaggagaatggcatgaacccgggaggcagagcttgcagtgagccaaaattgcaccac

SEQ ID NO: 14471 - DNA, 201 bp, Homo sapiens
  source 1..201: mol_type = unassigned DNA
aaggagatgcctgggccaggactgaagtctcccggaacaacgggctgggaccctgaggctggcaggggtgcagtgggcactgggtccatgtgtggcttgcgctggccgacgtgggcacacaaggggcacagctgccactgggggcctggaggggaggacccagctggggtctggagggccaggattttgcagaaggtttac

SEQ ID NO: 14472 - DNA, 201 bp, Homo sapiens
  source 1..201: mol_type = unassigned DNA
catggtgaaaccccgtctcaactaaaagtactaaaattacctgggcatggtggcacatgcctgtaatcccagctactcgggaggctgaggcaggagaatcgcttgagcccgggaggcggaggttgtagtgagccgtgatcgcgccactgcactccagcctgggcgatagagcaagactccatcttaataaaaaaattaaaa

SEQ ID NO: 14473 - DNA, 201 bp, Homo sapiens
  source 1..201: mol_type = unassigned DNA
gcgattctcctgcctcagcctcccgagcagctaggactacaggcgcccgcccccacgcccggctaattttttgtatttttggtagagacggggtttcaccgtgttagcaaggatagtctcgatctcttgacctcgtgattcgcctgcctcggcgttccaaagtgctgggattacaggcatgagccaccgcgcctggcgggg

SEQ ID NO: 14474 - DNA, 201 bp, Homo sapiens
  source 1..201: mol_type = unassigned DNA
agtgaaacccctctctactaaaaattcaaaaaaattagccgggtgtggtagcatgtgcctgtagtcccagctactcgagaggttgagacaggagaatggcgtgaacccgggaggcggagcttgcagtgagccgagatcgtgccactgcaccccagcgtgggcgacagagcaagactccgtctcaaaaaaaaagaaaataat

SEQ ID NO: 14475 - DNA, 201 bp, Homo sapiens
  source 1..201: mol_type = unassigned DNA
agatcatagatgaatttgaatcccaagtagcacagatgcgtcacacccatcatcctgccgctgaccatccccgggaccacatcacacccatcatcccgccgctgaccatccccgggaccaccatggcgggtcatgacagcacgtccttcctagaaacacgtctgaatagtacaagaaaaggacaccacccggattcgcgga

SEQ ID NO: 14476 - DNA, 201 bp, Homo sapiens
  source 1..201: mol_type = unassigned DNA
cgctgccacctacaagagctcctcctcccttgcaaccaatggccttgttcctggcttgtccagcaaactgaaaccatcgaaaaaggactttgccgggagcggtggctcacgcctgtaataccagcactttgggaggccgaggcgggctgatcacaaggtcaggaaatcgagaccatcctggctaacacggtgaaacccagt

SEQ ID NO: 14477 - DNA, 201 bp, Homo sapiens
  source 1..201: mol_type = unassigned DNA
ccagagccaggcgcctatcgtcaacccggagtgtgtgctccagccctctggggtcgaccctggttgctgggtcagtagtgtgaatctcctctcctcacacggggcccctaagacacgtgtttgtgtgtgtccgtccctaagacacgtgtgtgtgtatatgtgtgtgtgtgtgtgtgttccacatgaacgatttgagtcacc

SEQ ID NO: 14478 - DNA, 201 bp, Homo sapiens
  source 1..201: mol_type = unassigned DNA
gccagtgccttcacggcagcccctgcactgggcccggggtgggggcggggggtggttgtggagtccctggctttcacccagcgtgtctccttcacggggcgcaccccaaagcgacaagatgtttcccaggaaatggggaatggacgccaggctttcagggagaggttgaggcagcctgaggtaaaaagggacgggccgagg

SEQ ID NO: 14479 - DNA, 201 bp, Homo sapiens
  source 1..201: mol_type = unassigned DNA
gggtgttcatggagtccctagctttcacccagggtgcgtgtcttccccacggggggcaccccaaaggggcatgaagtttcccgggggatggggatatgacgccaggctttcagtgggacactgagacagccgggggaaaaaagccgggagggcaagaaggctggggcacttccatggaggccagttccttcccagcagcct

SEQ ID NO: 14480 - DNA, 201 bp, Homo sapiens
  source 1..201: mol_type = unassigned DNA
gcacccactgtcctgcaccaactgtccagcactccccagtgagatgaacccgttacctcagttggaaatgcagaaatcacccatcttctgcgtcgctcacgctgggagctgtagaccggagctgttcctattcggccatcttggctccaccccaccacattttctttatccagtctatcattgatggatatttgggttggt

SEQ ID NO: 14481 - DNA, 201 bp, Homo sapiens
  source 1..201: mol_type = unassigned DNA
gcaggtgccagggagaggcaacttcccaaacagataaaaacacttctggccgggcgcggtggctcatgcctgtaatcccagcacttcgggaggccgacgcgggcggatcacgaggccaggagatcgagaccatccttgctaacacggtgaaaccccgtctctattaaaaatacaaaaaattagccgggtgtggtggcgggc

SEQ ID NO: 14482 - DNA, 201 bp, Homo sapiens
  source 1..201: mol_type = unassigned DNA
tggtttcaccatgttagccaggatggtctcaatctcctgacctcgtgatccgcccgccacggcctccgaaagtgctgtgattacaggcatgagccaccgcgcccggcctaaaataactcttgaggttacataagaacatagtttatgtttacttatagctgtatctaatctaattaagaacttgttccttaagatgaaaaa

SEQ ID NO: 14483 - DNA, 201 bp, Homo sapiens
  source 1..201: mol_type = unassigned DNA
cgggctcccgacttgcgtggatgagcagttctgagccttacacagggcgggtgacgctgcagactgacaaggcccatccctggccacactgagccaaagcggaaggggtgcaggtgtggagtgccatgtgcgatgccactgccggccagctggagtggaggtgcccgccatgtgcatggggagacgtgcccctggttagcc

SEQ ID NO: 14484 - DNA, 366 bp, Homo sapiens
  source 1..366: mol_type = unassigned DNA
ccgccttgcagtttgatctcagactgctgtgctagcaatcagtgagattccgtgggcgtaggaccctccaagccaggtgtgggatatagtctcgtggtgcgccattttttaagccggtctgaaaagcgcaatattcgggtgggagtgacccgattttctaggtgcgtcggtcacccctttccttgactcggaaagggaactccctgacccctggcgcttcccaggtgaggcaatgcctcgccctgcttcggctcgcccacggtgcgcgcacccactggcctgcgcccactgcctggcactccctagtgaggtgaacccggtacctcagatggaaatgcagaaatcacccgtcttctgcgtcgctca

SEQ ID NO: 14485 - DNA, 201 bp, Homo sapiens
  source 1..201: mol_type = unassigned DNA
ggctcctgcagggccgagcctccccaatgagcgctgccccctgctccacggcgcccggtcccatcgaccgcccaagggctgaggactgtgggagcactgcgcgggactggcaggcagctccacctgcggcccccggtgcgggatccactgggtgaagccagctgggctcgtgagtctagtgtggacttggagaacctttat

SEQ ID NO: 14486 - DNA, 201 bp, Homo sapiens
  source 1..201: mol_type = unassigned DNA
cgcagaagatgagtgatttctgcatttccatatgaggtaccgggttcatctcactagggagtgccagacagtgggcgcaggacagtgggtgcagcgcaccgcacgcgagccgaagcagggcgaggcattgcctcactccggaagcacaaggggtcagggagttccctttcctagtcaaagaaaggggtgacagacggcacc

SEQ ID NO: 14487 - DNA, 201 bp, Homo sapiens
  source 1..201: mol_type = unassigned DNA
ttccctttcccagtcaaagaaaggggtgacagacagcacctggaaaatcgggtcactccaaccggaatactgcacttttccaacaggcttaaaaaacggcgcacctggagattgtatcccgcacctggctcggagggtcctatgcccacggagtctcgctgattgctagcacagcagtctgagatcaaactgcaaggcggc

SEQ ID NO: 14488 - DNA, 384 bp, Homo sapiens
  source 1..384: mol_type = unassigned DNA
ttcgtttctttggcctctgttgcccatgagaaatgaggaaaaataaaggccagattcctaataaccttcccggaagaaagagctgttttgagtgggtgtcggtgcttacatacgctgcttttaaaaaaatttgctttgttcaggtttgtgtgaatacaacgccggatgaactctgtcccttcagaagaaagccgggttggtgtgctcgatgacgcagcgcttgcagtggcgtttgacaaagcgcagggcctccacggagacctcgcagtcctggacattcagcgtctggaggtcaaagcagttggcggccacgatctgcaagccctggccggtgatgctctcgcaggacttgaggctgagccgcttgaggttgaagcagttcag

SEQ ID NO: 14489 - DNA, 216 bp, Homo sapiens
  source 1..216: mol_type = unassigned DNA
tgggagtgacccgattttccagctgcgtccatcacccctttctttgactcggaaagggaactccctgaccccttgcgcttcccaggtgaggcaatgcctcgccctgcttcggctcgcgcacggtgcgcgcacccactggcctgcgcccactgtctggcactccctagtgagattaacccggtacctcagatggaaatgcagaaatcacccgtcttc

SEQ ID NO: 14490 - DNA, 334 bp, Homo sapiens
  source 1..334: mol_type = unassigned DNA
ctgtgctggcaatcagcgagactccgtcgggtaggaccctccgagccagatgcgggatataatctcgtggtgcgccgttttttaggccggtccgaaaagcgcaatattcgggtgggagtgacccgattttccaggtgcgtccgtcacccctttctttgactaggaaagggaactccctgacccctggcgcttcccgagtgaggcattgccttaccctgcttcggctcgcgcacggtgcgcgcacccactgacctgtgcccactgtctggcactccctagtgagatgaacccggtacctcagatggaaatgcagaaatcaccgtcttctatgtca

SEQ ID NO: 14491 - DNA, 201 bp, Homo sapiens
  source 1..201: mol_type = unassigned DNA
ctcgatgcaaggcggggcaggcaaaagcccggcagccatccgagaaggtgtgatcaaaacggaggaacccgagagactcctcgaggactgcaggctcggcgcggagcccgcgtccaatggcctggttcatggcagcgcggaggtcatcttggccccaacgtccggtgcctttgggccgcaccagcaagaccttaggatccc

SEQ ID NO: 14492 - DNA, 270 bp, Homo sapiens
  source 1..270: mol_type = unassigned DNA
ccccggttcccgcccgtgcctctccctccacacctccccgcaagctgagggagccggctccggccttggccagcccaggaatgggcttccacagtgcagcggcgggctgaagggctcctcaagcgcggccagagtgggtgccaaggccgaggaggcgccaagagcgagcgagggctgtgagggctgccatgccggtacactgtcacttctcagaaggacgcagggcagagtttcaggctggctctgtcacccatgctggagtgcagtggc

SEQ ID NO: 14493 - DNA, 253 bp, Homo sapiens
  source 1..253: mol_type = unassigned DNA
ggtcggaaaagcgcagtattccggtgggagtgacccgattttccaggtgcgtccgtcacccctttctttgactcggaaacggaactccctgaccccttgcgcttcccaagtgaggcaatgcctcgccctgcttcggctcgcgcacggtgcgcgcacccactgacctgcgcccactgtctggcactccctagtgagatgaacccggtacctcagatggaaatgcagaaatcacctgtcttccacgtcgctcacg

SEQ ID NO: 14494 - DNA, 204 bp, Homo sapiens
  source 1..204: mol_type = unassigned DNA
taaattagtaaactcaacacttcaggatctttgttaagaagcttggttttggccgggaggatggagttcagcgggcagcggagctgtctcagtctttgccgccgccccgtccgggagggaggtggggggggtcagcccccctgcccggccagccgccccgtccgggaggtgaggggcgcctctgcccggccgcccctactggga

SEQ ID NO: 14495 - DNA, 228 bp, Homo sapiens
  source 1..228: mol_type = unassigned DNA
actcgggaagcacaaggggtcagggagttccctttcctggtcaaggaaaggggtgacagacagcacgtggaaaatcaggcctctcccacccgaatactgcgcttttcctacgggcttaaaaaccggcgcatcaggagactatatcccgcacctggctcggagggtcctacgcccacggagtctcgccgattgctagcacagcagtctgagatcaaactgcaaggtagc

SEQ ID NO: 14496 - DNA, 217 bp, Homo sapiens
  source 1..217: mol_type = unassigned DNA
cccagtggccgcaggggctgtcgtgtgctttgcagatggacacgcgctatttaacatagagatgcgctgagtccgggtgattagtgaatcgcacgtcatcgcagacactagaaagcgaaagcatacgggggaaggccccgggcacagacccagcacggccaccactcgagctggagctgcctgcgagacgatgagcgtctgcaatctgcatcctgcg

SEQ ID NO: 14497 - DNA, 201 bp, Homo sapiens
  source 1..201: mol_type = unassigned DNA
tccggtgtttaacccctgaattctaaggaaaaatagggcagaatagaaagtgaaacaggtccgaaggtactcaccgtgtggcaatatcccagacgagtccgatggtactcaccgtgtggcaatatcccagacgaacacccaagatgtgtccggagttggttccttccagtgggcttgtggtctcagtgacttcaagaatga

SEQ ID NO: 14498 - DNA, 204 bp, Homo sapiens
  source 1..204: mol_type = unassigned DNA
acggtgcgcacacccactgacctgtgcccactgtctggcactccctagtgagatgaacccggtacctccgatggaaatgcagaaatcacccattttccgcgtcgctcacgctgggagctgtagaccggagctgttcctatttggccatcttggctcctccccggcatttttcttactttttatttaggaccagtttgttgtctt

SEQ ID NO: 14499 - DNA, 223 bp, Homo sapiens
  source 1..223: mol_type = unassigned DNA
tagaagtacaagtaaccgtttccctctgcatcccagtggaacgtcgtgggtcttctgaagaccctctcttgccctgcaggctccggtactccaagcacgcgagtctgcgcaggaggcgcttcgctctccggagctccccactgcctcctagacacagtcccggctccttaccccgggcggaggctcttccagacgggtcccgactgcctctgtatgcccactg

SEQ ID NO: 14500 - DNA, 201 bp, Homo sapiens
  source 1..201: mol_type = unassigned DNA
tactcacaaggctgaggcaggagaattgcttgaagccgggaggcggaggctgcaatgagccgagatcacaccattgcatcccagcctgggcgacaagagcgaaactctgtaacaacatcaacaacaacaacaaaacaaaaacaaaaacaaaaaagaaaacaagagacgcggtggttctgcttgtaatcctagtactttggg

SEQ ID NO: 14501 - DNA, 203 bp, Homo sapiens
  source 1..203: mol_type = unassigned DNA
cctaatatcaagctaggtctagggaagtgctttttttttttttttttttttttatttgagacgtagtctcactctgtcacccaggctggagtacagtggcgcgatctcggctcactgcaagctccgcctcccgggttcacgctattctgctgcctcagcctcccgagtagctgggactaccgcccgaccaatttatttgtact

SEQ ID NO: 14502 - DNA, 201 bp, Homo sapiens
  source 1..201: mol_type = unassigned DNA
tacaaaaagaactacaaaacactgctgaaaaaaatcagacaacagccgggcgcggtgtctcatgcctgtaatcccagcagtttgggaggccgagttgggcggatcacgaggtcaggagacccagaccatcccggctaacacggtgaaacctcggtgaaacctcgtctctactaataatacaaaaaaattagccgggcgtgg

SEQ ID NO: 14503 - DNA, 201 bp, Homo sapiens
  source 1..201: mol_type = unassigned DNA
accattgttaaaaattaaattgggccgggcgcggtggctcacgcctgtaatcccagcactttggggggccgaggctggcggatcacgaggtcaggagatcgagaccatcctggctaacacggtgaaaccccatctctactaaaaatacaaaaaattagccgggcgaggtggcaggcacctgtagtcccagctactcgggag

SEQ ID NO: 14504 - DNA, 201 bp, Homo sapiens
  source 1..201: mol_type = unassigned DNA
tctgttctgattttgtttgtgggtgtcgggatatttgggtgcagagggtttgtgcccagttagaagcgacttttgttctcttctgcgtaggcgttggtgcgtccgccgcgtgtgcgtggtccgtgtgccgttgctccggcctgcgtctccatatgtgtaggaaaggacacgccgtctgtcctcacgccccctgtgactttt

SEQ ID NO: 14505 - DNA, 201 bp, Homo sapiens
  source 1..201: mol_type = unassigned DNA
gaggctgaggcaggagaatcatgtgaacccggaaggcggagcttgcagtgagccgagatcgcgccactgcactccagcctgggcgacagagcgagactccgcctcaaaaaaaaaaaaaaaaaaaaaaaaagtgacctgggccgggcgcggtggctcacgcctgtaatcccagcactttgggaggccgaggagggcagatca

SEQ ID NO: 14506 - DNA, 201 bp, Homo sapiens
  source 1..201: mol_type = unassigned DNA
tactagccaggcatggtagcacatgcctgtaatcccagctactcgggaggctgaggcaggagaatcgcttgaacccgggaggtggagattgcagtaagccgagttcgtgccatcctattccagcctgggcaagagcgaaactccactgggaaaaaaaaatccatagtttaggccgggcgcggtggctcacgcctgtaatcc

SEQ ID NO: 14507 - DNA, 201 bp, Homo sapiens
  source 1..201: mol_type = unassigned DNA
ggtcagccccccgcccggccagccgccccatccgggaggtgaggggcgcttctgcccggccgcccctactgggaagtgaggagcccctctgcccggccacgaccccgtctgggaggtgtgcccagcagctcattggggatgggccatgatgacaatggcggttttgtggaatagaaaggcgggaagggtggggaaaaaatt

SEQ ID NO: 14508 - DNA, 201 bp, Homo sapiens
  source 1..201: mol_type = unassigned DNA
actggccaaagagcactgtgggttctcggaagcacctgctcttccatcagctgtaaaccggaatgataaccagctcctaggctttggtttctgaatgtacgctgcgaacgatgcactgccttggcctcatggcaggggctggggaggcccgctctaccctgtaccccgacccgggcccaaagctgagcttgaagggccccc

SEQ ID NO: 14509 - DNA, 201 bp, Homo sapiens
  source 1..201: mol_type = unassigned DNA
cccgccactacgcccggctaattttttgtatttttagtagagacggggtttcaccgttttagctgggatggtcccgatctcctgacctcgtgatctgcccgcctcggtctcccaaagtgctgggattacaggcgtgagccaccgcacccggccccccctttttttttttttttttaagacagagtctcactctgctgccca

SEQ ID NO: 14510 - DNA, 201 bp, Homo sapiens
  source 1..201: mol_type = unassigned DNA
atctcggaaagtacaggaggtcatgccccagtgtggttcccctttcctgggtttaagtcaaggtcctcaccgtgcctgccggcctcccgggtctctgcgcggtggactctggacctccctgccccgtcctgcctcagggcctttgcacctgctgttaccgcggcctggaacgctcctcccctgaaaccctgtgactcccac

SEQ ID NO: 14511 - DNA, 201 bp, Homo sapiens
  source 1..201: mol_type = unassigned DNA
tgtgcttataagaacactagccattggatttagggcccacctaactcagtatgacctcatcttaacttgattacatctgaaaagacccttggccgggcgcggtggctcatgcctataatcccatcactttgggaggccgaggcaggtggatcacttgaggtcaggagttcgagaccagcctggccaacatggggaaatccc

SEQ ID NO: 14512 - DNA, 211 bp, Homo sapiens
  source 1..211: mol_type = unassigned DNA
cccagctctcaggacgtgcctcccatggctttctctgcggtgtggccacgcccggacttccttggcaccccccacctgccccgcacgacctgccctgcgcgacctgccccgcaaggccggggggagcgtcttcctcccccgcgacctcttacctcctcccggcactcgcccaccccgctgcccaggtctcctgctcctccggccctagggc

SEQ ID NO: 14513 - DNA, 201 bp, Homo sapiens
  source 1..201: mol_type = unassigned DNA
gtgcgcgcacccactgacctgcgcccactgtctggcactccctagtgagatgaaccgggtacctcagatgcaaatgcagaaatcacccgtcttctttgtcgctcacgctgggagctgtagaccggagctgttcctactcggccatcttggctcctccccccgaaaagagtatctttcaaccaagaagatggctttggctgc

SEQ ID NO: 14514 - DNA, 201 bp, Homo sapiens
  source 1..201: mol_type = unassigned DNA
acctagtggatcccacaccggggctgcaggtggagctgcctgccagtcctgcgccgtgtgctcacattcctcagcccttgggtggtcgatgggactgggcgccgtggagcagggggtggcactcgtccgggaggcttgggcggcacaggagcccatggagtgggtgggaggctcaggcatggtgggctgcaggtcctgagc

SEQ ID NO: 14515 - DNA, 201 bp, Homo sapiens
  source 1..201: mol_type = unassigned DNA
gatatgtacaggccatttaagagaatgatcgacttctggccacccggtgcctgcctgctgcggtggcgctgtgccgggcccaggggtcccagggactcccgccgtgctgtcagccttggaatctcagtggggacctgttgtgtggaaacttccggacaacagtctttcccatggagaacctacgtcttcacaatgttacca

SEQ ID NO: 14516 - DNA, 201 bp, Homo sapiens
  source 1..201: mol_type = unassigned DNA
ccactccttcatatctgtagagcgctctaccttctgtaacgtttatctgcgaaactgctgcgttaggccaggagcactccaagagcgagaggcagacgccgtctgacttttcaccctgacaggggacttttccacctggcagtgccaatatccggctcctacgcattctccatggaggatcaccaggtcagcccatgggag

SEQ ID NO: 14517 - DNA, 201 bp, Homo sapiens
  source 1..201: mol_type = unassigned DNA
ttctggcagagtcagcactcgactctccctgctcggagacccaggcgacggtgccgtgtgacccctgaccccgcggatgaggaaggtagagagagagcgcgcagacacggaggtcggcgctgaggttgagggagccacacccggccgcaagcttgagggagggaagccgggtgcggaaacagcccagcgggtccagaagtc

SEQ ID NO: 14518 - DNA, 201 bp, Homo sapiens
  source 1..201: mol_type = unassigned DNA
ccgctgccacgcccagctaattttttgtattgtttagtagagacggggtttcaccgtgttagccaggatggtctcgatctcctgaccttgtgatctgcccgcctcggcctcccaaagtgctgggattacaggcatgaaccaccgcacccggccaacctagtggttttgaggaggactcgtcaggagttttgtaaaatgtcc

SEQ ID NO: 14519 - DNA, 201 bp, Homo sapiens
  source 1..201: mol_type = unassigned DNA
accggatggacgtctgctgctgctccatcggggccgtgtggggagtcgagtgcgaggcctgcccggatcccgagtctctggagttcgccagcctgtgcccgcgggggctgggcttcgccagccgggacttcctgtctggccgaccattctataaaggtgcggttggggaaggggtcaggcccctggaaggatggggagggg

SEQ ID NO: 14520 - DNA, 201 bp, Homo sapiens
  source 1..201: mol_type = unassigned DNA
ttacaggtgtgagccacccggcctttttttttttttttttttttttttgagacgaagtctcactcttgtcccccaggctggagtgcaaaggcgcaatctcggctcactacaacctccacctcccgggttcaggcaattctcctgcctcaacccctggagtagctgggattacaggtgcctgccaccaggcctggctaattt

SEQ ID NO: 14521 - DNA, 201 bp, Homo sapiens
  source 1..201: mol_type = unassigned DNA
atcacccggcccagcaggtagaggcgcaggaacatggggatggacagcagcacgtccacgtcggcctcggccaccgagggcgcgtacgtgaaggccagccgcgccgtccacgtgaagcggtagtggccgggcaccgggtgaatggcgcacactgccagctctagcgagatgaggaacacgcgctcgcaggtcatggcgatg

SEQ ID NO: 14522 - DNA, 201 bp, Homo sapiens
  source 1..201: mol_type = unassigned DNA
gtagtcccagctactccaaaggcagaggtgagaatcgcttgaacccggaaggagtaggtttcagtgagctgaggtcatgccacttccctccagcctgggcgacagagaaagactctgtctagaaaaagtaaattatgggagtcggcgccggcgagcgccgcccgggaggcagcggctggaggagcggacgggccccgcggg

SEQ ID NO: 14523 - DNA, 201 bp, Homo sapiens
  source 1..201: mol_type = unassigned DNA
gaggctgaggcaggagaatggcgtgaacccgggaggcggagcttgcagtgagccgagatcccgccactgcactccagcctgggcgacagagcgagactccgtctcaaaaaaaaaataaaaataaaaataaaataaaataaaaaatgagctgggcatgatggcacaagcctgtggtcccagctactcaggaggctgaggtgg

SEQ ID NO: 14524 - DNA, 201 bp, Homo sapiens
  source 1..201: mol_type = unassigned DNA
gcagcttaataattctgcgttgcaaatttaaatattttacatatcattagacattaaaaacaaagatttatgctgctcgtctccacggagtgaggactccgttgacttcacacccggccatgaatctgcttgaggttcattagctgaacgtcttcggctaagaaagcccgtcgagtgggggcggcctctaaatcaccattt

SEQ ID NO: 14525 - DNA, 201 bp, Homo sapiens
  source 1..201: mol_type = unassigned DNA
gtgcatcttggctcactacaacctccaccacacccgcctctcccaggcttaagtgaccctcccacctcagtctccctagtagctgggactacaggtgcacggcaccatgaccggctaatttttgtattttttgtagagatgggattttgccatgttacccaggctggtctcgaactcctaagctaaagtaatccgcctgcc

SEQ ID NO: 14526 - DNA, 201 bp, Homo sapiens
  source 1..201: mol_type = unassigned DNA
ccccatctctactaaaaatacaaaaaattagccaggcgtggtggcacgccctgtaatcccagctactcgggaggctgaggcaggagaattgcttgaacgcgggttggggaggttgcggtgagccgagattgcaccactgcactccagcccgggtgacagtgcaagactccatctcaaaaaaaaaaaaaatctgtcaatcta

SEQ ID NO: 14527 - DNA, 201 bp, Homo sapiens
  source 1..201: mol_type = unassigned DNA
cacgtactacccacatgagccttcagtaggctccggccctaaataggcacatgcgtatttccccagctccttactgggatcctcccgctaagccacgcccgatgcccttgtctacagccatgagctgcagtaagatgcccaggcccggtgccagcgtgcgcagcacgtgtgccagcaccgtggaatccttgccgcccgagg

SEQ ID NO: 14528 - DNA, 201 bp, Homo sapiens
  source 1..201: mol_type = unassigned DNA
tggcactttggaaggccgacgtgggggcatcacctgagatcaggggttcgagaccagccttgcgaacgtgatgaaaccccgtctctactgaaaattcaacgattagccgggggtggtggtgcatgcctgtaatcctagctactcaggaggctgaggcaggagaatcgcttgaacccggaaggtggaagttgcaatgagccg

SEQ ID NO: 14529 - DNA, 201 bp, Homo sapiens
  source 1..201: mol_type = unassigned DNA
ctgaggtgggccgggcgcggtggctcacgcctgtaatctcaacactttgggaggccgaggggggtggatcacctgaggtgggcccggcgtggtggctcacgcctgtaatctcaacactttgggaggctgagaggggtggatcacctgaggtgggccgggcgcggtggctcacgcctgtaatctcaacactttgggaggccg

SEQ ID NO: 14530 - DNA, 201 bp, Homo sapiens
  source 1..201: mol_type = unassigned DNA
ggggtctcggccaggggtgggtgaggctggtgcccttccaggctcccctcagccacaggcagcaggtgccatgggagccctgccggcacccccttcctccgccagggtcctggttcatctgatggcgcagctcccctctaaggtgtgcaccggcgcagacactgtgcaggaagccaggctgatgcagacggttctcaagtc

SEQ ID NO: 14531 - DNA, 201 bp, Homo sapiens
  source 1..201: mol_type = unassigned DNA
aaagttgcccaaagtcccacaatgagttgatccaccgggaacaggaggaggccccgccgccagcctctgtgttatacttggcatctcgtccaggtttatcggagaggagatcacacgtcccttccccagccctcccaactcctccagccaagacaggtgccaccatctaccccagccccagtgtgctctgagtgtgccgga

SEQ ID NO: 14532 - DNA, 201 bp, Homo sapiens
  source 1..201: mol_type = unassigned DNA
cattctcctgcctcagcctcccgagcagctgggactacaggcgcccgccactgcgcccggctaattttttgtatttttttagtagagacggggtttcaccgtggtctcgatctcctgacctcgtgatccgcccacctcggcctcccaaagtgctgggattacaggcgtgagccaccgcgcccggccgtgtgtgttttttaa

SEQ ID NO: 14533 - DNA, 201 bp, Homo sapiens
  source 1..201: mol_type = unassigned DNA
gcacgtggcagcaggacttacctctggggtgccccgggtcggtgaactcatacttccccacgccaatggtccgcagcatctgcagcccgtgggccgagtcggttgtggggggcccattggtggcaggggcaccactggggagagtggcggacggctgggctggcggcggtggaggcagcaggggccctgccatgtggccgt

SEQ ID NO: 14534 - DNA, 279 bp, Homo sapiens
  source 1..279: mol_type = unassigned DNA
ggtggaagagctgacagcaaggggagtggccaaacggaggcggggcctggaagggggcgtggcttgcgggcctctgggccgcccggcctctttaggtgccgcagcggaaggcctggagcagaggctgcttctccgcccaagcactccctgggtgagtccatactcctggcgcgagtacgatcctctcctccagggaaggccgggtccctcgctggggttcgacccgactcttcccctctacccctttctccttgttctacacctagcgagcccaggccc

SEQ ID NO: 14535 - DNA, 201 bp, Homo sapiens
  source 1..201: mol_type = unassigned DNA
ctacacgggaggctgaggccagagaatggcgtgaacccgggaggcagagctcgcagtgagccgagatggcatcactgcactccagcctgggcgacagagcgagactcagtctcaaaaaaaaaaaaaaaaaaaaaggaaaatctaggttctttctcagactgaaatttctgtaaacataatttatgatttcatagcagccag

SEQ ID NO: 14536 - DNA, 201 bp, Homo sapiens
  source 1..201: mol_type = unassigned DNA
ctctgctgtaaaagaagtgcctatagaatctttattcttttttattattattattttttgagatagagtcgctgtcgcccgggttggagtacagtggcacgatctcggctaactgcaagctccgcctcccgggttcacgccattctcctgcctcagccccacccccccgccccgccccgccccgccccgccccgcccccga

SEQ ID NO: 14537 - DNA, 201 bp, Homo sapiens
  source 1..201: mol_type = unassigned DNA
gtttttctaacaccctgaaacttaaagtgtgatagtctcagaggactaccaacataagcatcacctgaaaacttgttagaaatgaagaactaggccgggcgcggtggctcacgcctataatcccagcactttgggaggcctagatgggaggatcacgacatcaggagaccgagaccatcctggctaacacggtgagacccc

SEQ ID NO: 14538 - DNA, 201 bp, Homo sapiens
  source 1..201: mol_type = unassigned DNA
catggtgaaaacctgtctctcctaaaaatacaaaaattagccaggcgtagtggcatgcgcctgtagacccagctacttgggtggctgaggcaggagaatcgctggaacccgggaggccgaggttgtagtgagccgagatcgtaccactgcactgcagcctgggtgacagaacaagactccaacttaaaaacaacaacaaca

SEQ ID NO: 14539 - DNA, 201 bp, Homo sapiens
  source 1..201: mol_type = unassigned DNA
tttgtccaggaaatgcacataggagctggtcactctgtgttttgagtcctctcggaggtgttggacttctagagagagaaacagagacacgtaagagggcgaagatgcctcagtggtgacacactggggagtcccgcccacgacccgtccacgaccggcacactcaacctgctccacggaaccccattccacagctcggtt

SEQ ID NO: 14540 - DNA, 201 bp, Homo sapiens
  source 1..201: mol_type = unassigned DNA
cgccaggacaagcgagggtggcctgagtcctgtgctcacatggcgtatgccgcccagtagatgacattgacggccgcaaacgccgcagggaacacagcgcgggcgtaaatgtcaatggtgtctgcgtcgatgggcctgagccgggcacggatgcccccctggcctcctgagcgggctgccccctccttcttcgtctcccct

SEQ ID NO: 14541 - DNA, 201 bp, Homo sapiens
  source 1..201: mol_type = unassigned DNA
cccctgttgagagtggactccgtgcgtgtgtcccccaggaacggtgacaagtacgacggcgactgggtccgggaccggcgtcagggacacggggtgctgcgctgcgccgacggctccacctacaaggtacccgggggcgcgcggcacctgctgcccagagggtacaggcctcgtggtgggcagggcgcgtggggtgtatgg

SEQ ID NO: 14542 - DNA, 201 bp, Homo sapiens
  source 1..201: mol_type = unassigned DNA
gataccataccctatattcttttattttttttgacccggagtctcgctctgtcgcccaggcttgggtgcagcagcgcgatctcggctcactgcaagctccgcctcccgggttcacatcattttcctgcctcagccttccgagtagctgggactacaggtgcccgccaccacgcccggctaattttttgtatttgtagtaga

SEQ ID NO: 14543 - DNA, 201 bp, Homo sapiens
  source 1..201: mol_type = unassigned DNA
ccccttcccagaaagcacatgaataggccgggcacggtggctcacgcctgtaatcccagcactttgggaggccgaggcgggtggatcacgtcagaagatcgagaccatcctggctaacacggtgaaaccccgtctctactaaaaatacaaaaaaaaataagccgggcgtggcagtgggcgcctgtggtcccagctactctg

SEQ ID NO: 14544 - DNA, 201 bp, Homo sapiens
  source 1..201: mol_type = unassigned DNA
gtgtgagagccacatgctaggaataagaggtatgccgagaggcggccgggcacggtggctcacgcctgtaatcccagcactttaggaggacgaggtgggcggatcacaaggtcaggagatcgagaccatcctggctaacatggtgaaaccccgtctctactaaaaatacaaaaaattagccgggcgtggtggcgggcgcct

SEQ ID NO: 14545 - DNA, 203 bp, Homo sapiens
  source 1..203: mol_type = unassigned DNA
ttccacaacgtctttcaccatctgtgagcacggcctgcaacgtggaagacacaaccccacctgactctccccagacctccctgctgctttagcctcctacgcgccagcctccgggccttcaccccaaaccttcccaggctcagaatgccctgccccaaactccaccgacaccatctgcgaaactgtagccttccatgaccaac

SEQ ID NO: 14546 - DNA, 201 bp, Homo sapiens
  source 1..201: mol_type = unassigned DNA
atcatacatggccgggcgcgatggctcacgccatcgagtgattgctgtaatcccagcactttgggaggccgagacgggaggatcacgaggtcaggagatcgagaccatcctggctaacacggtgaaaccccgtctctactaaaaaaacaaaaacattagccgggcgtggtggtgggcgcctgtagtcccagctacttggga

SEQ ID NO: 14547 - DNA, 201 bp, Homo sapiens
  source 1..201: mol_type = unassigned DNA
agtcccagctactcgggaggctgaggcaggagaatggcgtgaacccgggaggcggagcttgcagtgagccgagatcgcgccactgcactccagcctgggcgacagagcgagactccgtctcaaaaaataaaaataaataataataataattccagatattttacaataattttcaggcacaagagttttcacgagagtagg

SEQ ID NO: 14548 - DNA, 201 bp, Homo sapiens
  source 1..201: mol_type = unassigned DNA
tgggggtcccagaacttttgtagtttatatctctttggtcttttcctgggcagcttggaggcttccgaccttccggagcccctggtatttgagtttctccgtgaaagctcgtccgagaagggcttctgccccgggtctggcagactggagtcccttcctgggcttttttcttctttccctgggtgccttgtctctcgccaa

SEQ ID NO: 14549 - DNA, 201 bp, Homo sapiens
  source 1..201: mol_type = unassigned DNA
acgcgccaccacgcccggctaatttttgtatttttagtggagacggggtttcaccatgttggtcaggctggtctcaaactcctcacctcgtgatccgcccgcctcggcctcccaaagtgttgggattacaggagtgagccaccatgcccggccctaatctcagttttatagatgaaaaaacggaagctcaggatcagtgac

SEQ ID NO: 14550 - DNA, 201 bp, Homo sapiens
  source 1..201: mol_type = unassigned DNA
aagcagtatttggttttctgttcctgtgttaattcactccggataatggcctccagctgcatccatgttgctgcaaaggaccggattttgttctttttacgactgcatagtattccatggcatatatatatatacaccacattttcttaatccggtctatccatgtctttgctgttgtgaatagttctgcaatgaacatgc

SEQ ID NO: 14551 - DNA, 201 bp, Homo sapiens
  source 1..201: mol_type = unassigned DNA
ttaaataaatgccgggtgtcagggccgctgagtaagacaacaggccgcaaggacgcagcagaggaccctcggtcgatttgctgcgatggagtgagccagcggtgaggcctgaaggcccctgttttattttcccctcggagcagaggccggggagggtgctgggtgtcagcacagagcagagggccggtcacggaactgggg

SEQ ID NO: 14552 - DNA, 201 bp, Homo sapiens
  source 1..201: mol_type = unassigned DNA
gggagtgcagtggcgcgatctcggctcactgcaacttccgcctcccgggttcaagcgattctcctgcctcagcctccccagtaggtaggactacagtcgcgtgccaccacacccggctaattttttgtatttttagtagagactgggtttcaccatgttagccagaatggtctcaatctactgacctcgtgatccgcccgc

SEQ ID NO: 14553 - DNA, 201 bp, Homo sapiens
  source 1..201: mol_type = unassigned DNA
ttagtagaaacagggtttcaccatgttggccagaatggtcttgatctcttgaccttgtgatctgcccgcctcgctctcccaaagcgctgggattacaggcgtgagccactgcgccctgtccactgtccatcttcttttgctcgctctatcctgactgccggggccctggacactacacaaagagctagctggagagtgaga

SEQ ID NO: 14554 - DNA, 201 bp, Homo sapiens
  source 1..201: mol_type = unassigned DNA
ggaatgcagtggcgccatctcgctgactgcatcctccgcctcccggttgcaagtgattctcttgcctcagcctccccagtagctgggattacaggcgtgcgccacaacactcagctaatttttgtatctttagtagagacgggttttcaccaagttggccaggctggtctcgaactcctgaccccgtgatccgcctgcctt

SEQ ID NO: 14555 - DNA, 201 bp, Homo sapiens
  source 1..201: mol_type = unassigned DNA
cacctcggcctcccaaagtgctggtgttataggtgtgaaccatcgcacccggcctgctttttattttattatttatttattttttctgagactgagtctcgctcttgttgcccaggctggagtgtgcagtggctcaatctcggctcactgcaaactccgcctcccgggttcaagcgattctcctgcctcagccccctgagt

SEQ ID NO: 14556 - DNA, 3238 bp, Homo sapiens
  source 1..3238: mol_type = unassigned DNA
tttttccccggactggctcaacttctcctttcaagcctggcatcctgttcccttccagcgggggatatcttgccgctttggggtgcccgtcgtgggcgccgcacgattctgggtgcaagccagagactccacaaacacgccgggccctgcgcagcggcttccgggaaggcactgtcatccgtgggagggcccggcccgccactttttaccccctgctgcctcaacgtcaccttccaagcctggcgtcctcttcccttcccctggaggccttcgtgctgctttggggtgccccctgtgggcgagacacacaacctgggtgcaagccagggactccgcgaccatccctggcccggcgcaggggtggccatccttgggacgacaccatcccgccacttttttccttggactgtctccactatccccttcaaccctggcgtcctgtacccttcccccagtggccttcttgccgctttgtggtgctccccgtgggtgagacacgcacccggggtgcaagacagggactccaggacgctcccgggcccactgcagaggctgctgggaaggcagtgtcgtccgtgagaggaccccagcatccccgctttttttccccggggctgcctcaacttcccccttcaagactgacgtgctgtccctttcccccgggaaccttcttgctgctttgtggtgcccgccgtgggcaagacactcaccctgggtgcaagccagggaatcaacaacccccgcatgcccggcaaaggggctgccggtaaggcactgtcattcgtgggatcaccccagcctcgctgcttttttctccaggctacctaaacgtccccattcaagcctggcgtcctgttgccttcccgcgggggacttcttgccactttggggtgccccccgtgggcgagacacgcacattgtgtgcaagacagggactccgcgaccctcccgggactggcataggggctgtagggaaggcactgtcatccgtgaaaggaccccagcctcgcccctttttttcctgggctgcctcaacgtcccctttcaagtctggcatcctgttcttccccccccggggctttcttgctgctttggggtgccacccgtgggcgaggcacgcaccctgggtgtaaaccagggactccaagacccccagggccaggcgcaggggatgtcgggaagtcactgtcctccgtggaaagtttttccctggactgcctcaaagtcccctttcaagcctggcatcctgttcccttcccccggagcccttcttgcagctttcgcgtgcacacttaggcgagacacgcactctgttgcaagacagggactccaaacccccccgcctgggccaggctcaggggctgccgggaaggcactgtggtctgtgggacgaccacagcctagccgctgttttcctctggctggcccaacgtccctcttcaagcctgacatgttgtccccttcccccgggggccctgttgccactttcacgtgcaccccgtgagcaagacaggcaccctgggtccaagccaggggctccaccgtccacctgggtcccactcagaggctgccgggaaggcactgttctcagtggaaattttttccccggactgcctcaacgtcccctttcaagctcggcgtcctgttcccttccactcggggacttcttaccgcattgcggtgcccatcgtgggcacgacacgcaccccgggtgcaagccagggactccacaaccaccccaggcccgatgcaggggctaccggacaagacactgttgtccttgggatgacaccggtctgcctcaactctacctttcaaccctggagtcctgtacccttcccctgggggccttcttgctgctttgtggtgccactcgtgggcgagacacacaacctgggagcaagccagagactccacgacacctctgggcccactgcagaggctgccaggaaggcggtgtcatccgtgggaggaccccagcttcaccacttttaccccggggccgcctcaacctccccttcaagcctgacgtgctctcccttcccccgggaatctacttgccgctttggggtgcccccttgagcgagacacgcaccctgggtgcaagccacggactccaggaccaccctggcccagcgaaggggctgccaggaaggcactgtcgtttgtgggagaaactcagcgtcgccgtttttttccacgggctacctcaaagtcccccttcaagtctgaggtgctgtccccttcccccaggggcctacttgccgctttggggtgcctcccatgggcgaaacacgcaccctgggtgcaagatagggactccacgatccccccgggcccagcgcagggactgccaggaaggcactgtcatccgtaggaggaacccgactagccgcttttctctctgtgctgcctcagcatccccattaaagcctggccttctgtggcgttcgcccggcggccttcttgccactttggggtgcccccatgggtgcgacccgcaccctcggtgcaagccagggactccacgaccaccccgggcctgacgcaggggctgctgggaaggcactgtcgtccatgggacgaccccagcctgccacgtttttccccggactgcctcaactatccctttcaaccctggcgtcccatacccttcccccggtggccttcttgccgctttgtggtgccccccgagggcgagacacgcaccttgggtgcaagccaaggactccatgacgctcccaggcccaccacagatgctgtcgggaagacagtgttatccgtggcaggaccccagcatcccctctttattcccggggctgcctcaacgtccccctccaagcctgacgtgctgtccccttcccctgggaacctacttgccgctttggggtgccccccgtggaaccctgggtgcaagcctgggacacaacaaccccctcgggcctggcaaaggggctgccgggaaggcaccgtggtccgtgggaagttttttcctggactgcttcaaagtcccctttcaagcctggcgtcctgttcccttcccagggggcattcttgccgctttggggtgtccccccgtgggcgcgacacgcaccctgggttcaagtcaggaactccacgacaaccccgagtctggcgcaggggctgccgggaaggcactgtcgtccgtgtgacgatcgctgcctgctgctttttccctcgtgctgcctcaacgtcacctttcacgcctggcgttcta

SEQ ID NO: 14557 - DNA, 201 bp, Homo sapiens
  source 1..201: mol_type = unassigned DNA
tgccacctcgcccggctaattttgtgtgtgtgtgtttttagtagagacggggtttcaccgtgttagccaggatggtctcgatctcctgacctcgtgatccgcccccctcggcctcccaaagtgctgggattacaggcgtgagccaccgcgcccggccttctgtatattattttctgagacactttgaggtaatagccttgg

SEQ ID NO: 14558 - DNA, 201 bp, Homo sapiens
  source 1..201: mol_type = unassigned DNA
cgacgcccaagcactcgagaacggtgaccaattattttggagagcacttgcaaaggcggccccctagccgtcctctccggaagccgcagtctttgtgtccgcccccgcaccttgcacacctgctgaggtggggcgtgttaatcatcaaattactaatgagtgatggcccaaattgcaggcagagtaatgaatagatggtgg

SEQ ID NO: 14559 - DNA, 201 bp, Homo sapiens
  source 1..201: mol_type = unassigned DNA
tgcaataagcccgggggttgaccctgggcgtgccgggggcgagggggtcacggtggagacggacacgggcgtggggcggccgagacctgcacggcccagcgggcaccggcactgcggggtcttcgttctcagaggattactgtttcatattgaagctctctcttttgtacattcagagtttgatgcatttctaatcaccgt

SEQ ID NO: 14560 - DNA, 201 bp, Homo sapiens
  source 1..201: mol_type = unassigned DNA
gggcgtggtggcgggtacttgtaatcccagctactcgggaggctgaggcaggagaatggtgtgaacccgggaggtggagcttgcagtgagccgagatcgcgccactgcactccagcctgggcgacagagcgagactccgtctcaaaaaaaaaaaaaaaaaaaaagaagaagtcagagcaaggaggcagaatgatccccagg

SEQ ID NO: 14561 - DNA, 201 bp, Homo sapiens
  source 1..201: mol_type = unassigned DNA
ggccagggcgcacgcggcgctggggcccggggggatgcccgctgtcccggccgcaccctggtcacgtacacctttgggggcggctgctccactgcagggcgcgggggcggagctcggcccaagaagagcggcaaagggcgggcggccctggcggcccagctcagggcccgggagtgcctgggggtccccccgtcccggggg

SEQ ID NO: 14562 - DNA, 201 bp, Homo sapiens
  source 1..201: mol_type = unassigned DNA
aaaaagcaaaaaacaaaaattagccggccatagtggtgggtgcctgtaatcccaactgctcgggaggctgagtcaggataatagcttgatcctgcggggcggaggttgccatgagccaaaatcgtgccacttcactccaggttgggcgcaagagcgagactctgtctcaaaaaaaaaaaaaaagtttcatgccgggcgccg

SEQ ID NO: 14563 - DNA, 201 bp, Homo sapiens
  source 1..201: mol_type = unassigned DNA
caggcgtgagccaccgcgcccggctatccctgataactttatttcaaatagtgacaggttaaaagttaagagcggatgtttcagtatctagtttcccagcgtcttgccagttactttaagcttgtcgacaggagtttgatttcactgacctccctccttcctagagctatgcttactttttaaaattttaagaagctgctt

SEQ ID NO: 14564 - DNA, 201 bp, Homo sapiens
  source 1..201: mol_type = unassigned DNA
actccggaggctgaggcaggagaatggcgtgaacgcgggaggtggagcttgcagtgagccgagatcgcgcctcctgacctcaggtgatctgcctgcctccgcacccggccaacctgtttttgtatacataatcttttcactgctcaatacatttcagggttcttcaatttcacacttcacacttcagcttcttcaatagat

SEQ ID NO: 14565 - DNA, 201 bp, Homo sapiens
  source 1..201: mol_type = unassigned DNA
cagggtttcgctgtgttggccgggccggtctccagcccctaaccgcgagtgatccgccaacctcggcctcccgaggtgccgggattgcagacggagtctcgttcactcagtgctcaatggtgcccaggctggagtgcagtggcgtgatctcggctcactacaacctacacctcccagccgcctgccttggcctcccaaaat

SEQ ID NO: 14566 - DNA, 201 bp, Homo sapiens
  source 1..201: mol_type = unassigned DNA
aggccgaggcaggcggatcacaaggtcagaatatcgagaccatcctgggtagcacgatgaaaccccgtctctatcaaaaaatacaaaaaattagccgggcgtggtggtcggcgcctgtagtaccagctgctcaggaggctgaggcaggagaatggcatgaacctgggaggcggagcttgcagtgagccgagattgcgccac

SEQ ID NO: 14567 - DNA, 201 bp, synthetic construct
  misc_feature 1..201: note = Description of Artificial Sequence: Synthetic polynucleotide
  source 1..201: mol_type = other DNA
gagtgtagtggygtgatttyggtttattgtaagtttygtttttygggattaygttatttttttgttttagtttttygagtggttgggatttataggtgttygttaatatgttyggttaattttttgtatttttagtagagayggggttttatygtgttagttaggatggtttygatattttgatttygtgattygtttatt

SEQ ID NO: 14568 - DNA, 208 bp, synthetic construct
  misc_feature 1..208: note = Description of Artificial Sequence: Synthetic polynucleotide
  source 1..208: mol_type = other DNA
ttggttaatatgatgaaattttgtttttattaaaaatataaaaaattagtygggygtggtggygggygtttgtagttttagttattygggagattgaggtygaatggygtgaattygggaggyggagtttgtagtgagtygagattatattattgtattttagtttgggygatagagygagattttgttttaaaaataaataaataaa

SEQ ID NO: 14569 - DNA, 201 bp, synthetic construct
  misc_feature 1..201: note = Description of Artificial Sequence: Synthetic polynucleotide
  source 1..201: mol_type = other DNA
atayggtgaaatttygtttttattaaagtataaaaaattagtygggtatagtggtataggtttttagttttagttatttgggaggttgaggtaggagaatygtttgaattygggaggyggagggtgtagtgagttattgtaygttagtttgggtaatagagttagatttygttttaaaaaaaaaaaaaaaaaagaaagaaa

SEQ ID NO: 14570 - DNA, 201 bp, synthetic construct
  misc_feature 1..201: note = Description of Artificial Sequence: Synthetic polynucleotide
  source 1..201: mol_type = other DNA
gtygaggtgggygaattatttgaggttaggagtttaagattagtttggttaatatggtgaaattttatttttattaaaaatataaaaattaatygggtatygtggtgygtgtttgtaattttagttattygggagattgaggtaggagaattgtttgaattttgtyggtagaggttgtaatgagttgagattgtattaygg

SEQ ID NO: 14571 - DNA, 201 bp, synthetic construct
  misc_feature 1..201: note = Description of Artificial Sequence: Synthetic polynucleotide
  source 1..201: mol_type = other DNA
ttttggaggttatatttggataggagtyggtttttaattttagttaagagtttatagaggggtttttgtttaattgtatggagtttatggttgataggygyggyggtaggaygggaygggatyggatgggttgtgtatttgtttttatattagtattatattgttttgattattttagtttgtaagatgtttgaaatttat

SEQ ID NO: 14572 - DNA, 201 bp, synthetic construct
  misc_feature 1..201: note = Description of Artificial Sequence: Synthetic polynucleotide
  source 1..201: mol_type = other DNA
aaaattataataaagtttttgtttaattatagattttgatttattggttaggtaggttgtttggtttttgatttgtatttagagggttttyggattttggygttgygtgggttagtgtttygggagtyggggatyggtattggtygtgttyggttgttgagtgtgttttattaattattatttygtttttttaggttaatg

SEQ ID NO: 14573 - DNA, 201 bp, synthetic construct
  misc_feature 1..201: note = Description of Artificial Sequence: Synthetic polynucleotide
  source 1..201: mol_type = other DNA
gaggttttttttatttaggtaaagaagaaagaaggatggttttaggagtttatataatatggttaaaggtygggtagygtgtagtagaatgtaagatgagyggttaggttatagggygagattatgaaggattttttttyggttttaaatgttttttaagagtgtttttttattatttttttttttattttttaagaatag

SEQ ID NO: 14574 - DNA, 201 bp, synthetic construct
  misc_feature 1..201: note = Description of Artificial Sequence: Synthetic polynucleotide
  source 1..201: mol_type = other DNA
tttttaagtagttgggattataggygttygttattaygttyggttaatttttaatatttttagtagagayggggttttattgtgttagttaggatggtttygattttttgatttygtgattygttygtttyggttttttaaagtgttgggattataggtttgagttattgygttyggtttttagtttttatatttgttaaa

SEQ ID NO: 14575 - DNA, 201 bp, synthetic construct
  misc_feature 1..201: note = Description of Artificial Sequence: Synthetic polynucleotide
  source 1..201: mol_type = other DNA
ttaatataaaaattagttgttttagtygggygyggtggtttaagtttgtaattttagtattttgggaggtygaggygggyggattaygaggttaggagatygagattattttggttaatayggtgaaatttygtttttattaaaaatatataaaaaatgagtygggygyggtggtaggygtttgtagttttagttatttag

SEQ ID NO: 14576 - DNA, 201 bp, synthetic construct
  misc_feature 1..201: note = Description of Artificial Sequence: Synthetic polynucleotide
  source 1..201: mol_type = other DNA
taaattttgttgttgtttattttatgggtttatattgtttttatgagttgtaatatttatygtaaaggtttgtaggtttatttttgagtyggtaagattaygaatttattagaagaaatttygaatatattygaatattagaaggaataaatttyggataygttatttttaagaattgtaatatttatygtaagggttygt

SEQ ID NO: 14577 - DNA, 201 bp, synthetic construct
  misc_feature 1..201: note = Description of Artificial Sequence: Synthetic polynucleotide
  source 1..201: mol_type = other DNA
ttttgttttagtttttttagtagttgggattataggygttygttatygygttyggttaattttttgtatttttaatagaaayggggttttatygtggtttygattttttgatttygtgattygtygtttatttyggttttttaaagtgttgggattataggygtgagttatygygttyggtttttttttttatttttaata

SEQ ID NO: 14578 - DNA, 201 bp, synthetic construct
  misc_feature 1..201: note = Description of Artificial Sequence: Synthetic polynucleotide
  source 1..201: mol_type = other DNA
ggggttttatygtgttagttaggatggtttygattttttgattttgtaataygttygtttyggttttttaaaatgttgggattataggygtgagttatygygtttagttggttttataggtatttatgtatattaatagtttttttttgagayggagtttygttttatttttaggttggagtgtaatggygttgttttgat

SEQ ID NO: 14579 - DNA, 235 bp, synthetic construct
  misc_feature 1..235: note = Description of Artificial Sequence: Synthetic polynucleotide
  source 1..235: mol_type = other DNA
ttaattttttaggtgtygtttgttatttttttttttgattaggaaagggaattttttgattttttgtgttttyggagtgaggtaatgtttygttttgtttyggtttaygtagggtgygygtatttattgatttgygtttattgtttggtattttttagtgagatgaattyggtattttagatggaaatgtagaaattatttattttttgygtygttttttttgggagttgtagat

SEQ ID NO: 14580 - DNA, 201 bp, synthetic construct
  misc_feature 1..201: note = Description of Artificial Sequence: Synthetic polynucleotide
  source 1..201: mol_type = other DNA
ggtagataaagatatatgattagggtyggtygyggtgatttatgtttgtaattttagtattttgggaggttaaggygaayggattaygaagttaggagatygagattattttggttaatatggtgaaattttgtttttattaaaaatataaaaaattagtygagygtggtggtgggygtttgtagygttagttattygggg

SEQ ID NO: 14581 - DNA, 201 bp, synthetic construct
  misc_feature 1..201: note = Description of Artificial Sequence: Synthetic polynucleotide
  source 1..201: mol_type = other DNA
taggtgatttttgtatttttatttgaggtatygggtttattttattagggagtgttagatagtgggygygggttagtgggtgygtgtattatgygtaagtygaagtagggygaggtattgttttatttgggaagygtaaggggatagggagtttttttttygagttaaaaaaaggggtgatagaygtatttggataattag

SEQ ID NO: 14582 - DNA, 201 bp, synthetic construct
  misc_feature 1..201: note = Description of Artificial Sequence: Synthetic polynucleotide
  source 1..201: mol_type = other DNA
agagatagaagttgttggagggygagaggaaygtattagtggaagaagatagaagyggttggttayggagagtatgttagtagaagaatatatttatagaygtyggttygttygygggtttttyggtaggttatygatyggtgggaygaggtggagtttgttttgggtagtaggaggatagttygggtatttagyggttta

SEQ ID NO: 14583 - DNA, 201 bp, synthetic construct
  misc_feature 1..201: note = Description of Artificial Sequence: Synthetic polynucleotide
  source 1..201: mol_type = other DNA
tttatagaggtaggtaggtttttttgagttgtggtgggttttatttagttygagtttttyggttgttttgtttatttaagygagtttgggtaatggygggygttttttttttagtttygttgttgttttgtagtttgattttagattgttgtgttagtaattagtaagattyggtgggtataggatttttygagttaggtg

SEQ ID NO: 14584 - DNA, 201 bp, synthetic construct
  misc_feature 1..201: note = Description of Artificial Sequence: Synthetic polynucleotide
  source 1..201: mol_type = other DNA
gtttttttttttagttaaagaaaggggtgatagaaggtatttggaaaatygggttatttttattagaatattgygttttttygaygggtttaaaaaayggygtatttggagattatattyggtatttggtttagagggttttaygtttatagagtttygttgattgttagtatagtagtttaagattaaattgtaaggygg

SEQ ID NO: 14585 - DNA, 201 bp, synthetic construct
  misc_feature 1..201: note = Description of Artificial Sequence: Synthetic polynucleotide
  source 1..201: mol_type = other DNA
ygttygttatttttttttttgattyggaaagggaattttttgattttttgtgttttttaggtgaggtaatgtttygttttgtttyggttygygtayggtgygygtatttattggtttgygtttattgtttggtatttttttagtgagatgaattyggtattttagatggaaatgtagaaattattygttttttgygtygtt

SEQ ID NO: 14586 - DNA, 201 bp, synthetic construct
  misc_feature 1..201: note = Description of Artificial Sequence: Synthetic polynucleotide
  source 1..201: mol_type = other DNA
gtaagtaaggggygtgttttagttttgtttgtgttagagtttttttatttttattatttggtaggtttagygttygggaataatgaygtaygtggataagyggagggtgagtaaggtgaagaggagttttattgagtaatagaatagtttagaggagattygyggtgggtagtttttttttgtagttagggtgttttgatg

SEQ ID NO: 14587 - DNA, 201 bp, synthetic construct
  misc_feature 1..201: note = Description of Artificial Sequence: Synthetic polynucleotide
  source 1..201: mol_type = other DNA
ggtagattatttgaggttaggagttygagattagtttggttaatatggtgaaatttygtttttattaaaaatataaatattagtygggygtggtggtggtygtttgtaattttagttattygggaggttgaggtaggagaattgttggatttygggaggtagatgttgtagtgagttaagattatgttattgtattttagt

SEQ ID NO: 14588 - DNA, 201 bp, synthetic construct
  misc_feature 1..201: note = Description of Artificial Sequence: Synthetic polynucleotide
  source 1..201: mol_type = other DNA
ttgtagtatatattattatttttttagtatattattattttttaattyggtttttatygttaataaagttgtyggttgtaggaatgagagagtggtagaaygatattttygttttattttttgggattttttagttgttggyggttttaagtttttaggagttayggtgttttttttttttagatgttagtgttaatagtg

SEQ ID NO: 14589 - DNA, 201 bp, synthetic construct
  misc_feature 1..201: note = Description of Artificial Sequence: Synthetic polynucleotide
  source 1..201: mol_type = other DNA
ggttagaagayggtgagtggaaagttygggygygtggagagattttaagaaggggttgtttagttgtgaattttgtatttgtygttygtgttttatttggyggttttgaaattaggtttttatttggatttttgtgagttgtatattttyggttagttattttygttttagagggtttagatattggtagtgtyggaagac

SEQ ID NO: 14590 - DNA, 207 bp, synthetic construct
  misc_feature 1..207: note = Description of Artificial Sequence: Synthetic polynucleotide
  source 1..207: mol_type = other DNA
gtttttgtgatttttgtagttagygaattagtatatttttggggttgaagttaygtgttaggtaygttagygttattagttygtttagggttagttttttygayggyggyggtagtaggtggatttygggtyggaatgtgttttttggagggtagagagttaggttagggggttgggtaggggatgagagagtttttttgttttggt

SEQ ID NO: 14591 - DNA, 201 bp, synthetic construct
  misc_feature 1..201: note = Description of Artificial Sequence: Synthetic polynucleotide
  source 1..201: mol_type = other DNA
tttatggggtagttagaagggagatggtttttttttggagttggggtgttyggtagtttyggtttttttttgattgtttaggttaattttygttttttttygttggtttayggtttattggttttygggtgtttgttagygtgtttttttgttggggtgtttttatggatgattagygtttgtgttttttttttttgatgt

SEQ ID NO: 14592 - DNA, 201 bp, synthetic construct
  misc_feature 1..201: note = Description of Artificial Sequence: Synthetic polynucleotide
  source 1..201: mol_type = other DNA
gaagaygggtgatttttgtatttttatttgaggtatyggttttattttattagggagtgttagatagtgggygtaggttagtgggtgygtgtatygtgygygaagtagggygaggtattgttttatttgggaagygtaaggggttagggagtttttttttygagttaaagaaaggggtgayggaygtatttggaaaatygg

SEQ ID NO: 14593 - DNA, 201 bp, synthetic construct
  misc_feature 1..201: note = Description of Artificial Sequence: Synthetic polynucleotide
  source 1..201: mol_type = other DNA
ggggygtggttttttggagggaattagtgtggagatgttygtgtgtttggggygtggtttttyggagggagttagtgtggagatgttygtgtgtttggggygtggtttattagagggagttagtgtggagatgttygtgtgtttggggygtggttttttggagggaattagtgyggagatgtyggtgtgtttggggygtgg

SEQ ID NO: 14594 - DNA, 201 bp, synthetic construct
  misc_feature 1..201: note = Description of Artificial Sequence: Synthetic polynucleotide
  source 1..201: mol_type = other DNA
gaygttttttattttttagatggggtggtggyggggtagagatattttttagtttttagatggggtygyggtttggtagaggtgttttttatattttagaygatgggtggtygggtagagaygttttttattttttagaygggatgayggttaggaagaggygttttttattttttagattgggyggtygggtagaggggt

SEQ ID NO: 14595 - DNA, 201 bp, synthetic construct
  misc_feature 1..201: note = Description of Artificial Sequence: Synthetic polynucleotide
  source 1..201: mol_type = other DNA
gagtatagygtyggygggttggtattgttgggggattyggygtattttttatagttgttgtttygggtggtaagttttttattgttyggggttggtggggyggttagttgttyggagtgtggggttygttaaggttatgtttatttagaatttgttttggtttatygygagtagttttagttttygtttygygtttttttt

SEQ ID NO: 14596 - DNA, 201 bp, synthetic construct
  misc_feature 1..201: note = Description of Artificial Sequence: Synthetic polynucleotide
  source 1..201: mol_type = other DNA
tttttgagtagttggggttataggtgtttattattaygttyggttaattttttgtatttttagtagagatggggttttatygtgttagttaggatggtttygattttttgaygttgtgatttatygtttyggtttttygaaatgttgggattataggtttgagttatygtattyggttatatttatttatttttaattaga

SEQ ID NO: 14597 - DNA, 201 bp, synthetic construct
  misc_feature 1..201: note = Description of Artificial Sequence: Synthetic polynucleotide
  source 1..201: mol_type = other DNA
ttttttttttttttgattggtttygtttttattgtyggtttygtttttattgtyggttygggttttatttaygttggagttgttttatttaaggagattgygtagttggaaagttataygtgtgagtttagaggygggtttyggttgtagatttgttatggttttygaagtttttgtgygtttaggggtgttttttggtyg

SEQ ID NO: 14598 - DNA, 201 bp, synthetic construct
  misc_feature 1..201: note = Description of Artificial Sequence: Synthetic polynucleotide
  source 1..201: mol_type = other DNA
gttagttagttattttgagatggagttttgttttgtygtttaggttgtagtgtagaatygtttttttggtttattgtaatttttatttttygggtttaagygataattttgttttagttttttaagtagttggaattatagaygtgtattattaygtttaattaatttttgtatttttagtagagatggggtttygttata

SEQ ID NO: 14599 - DNA, 201 bp, synthetic construct
  misc_feature 1..201: note = Description of Artificial Sequence: Synthetic polynucleotide
  source 1..201: mol_type = other DNA
gyggttttttttgatttagatygtttttaaatatygaaygttgaattgggtygggygyggtggtttttatttgttattttagtattttgggaggtygaggygggyggattatgaggttaggagatygagattattttggttaatayggtgaaatttygtttttattaaaaatataaaaaaaaaaaattagtygggygtgat

SEQ ID NO: 14600 - DNA, 201 bp, synthetic construct
  misc_feature 1..201: note = Description of Artificial Sequence: Synthetic polynucleotide
  source 1..201: mol_type = other DNA
ttatttttgttttttattttgggggttttatgatttyggagtttttaygttttggtatagagtttgttttttygggattgggtttyggtygagtagatatygtttagttgttttttgattagygttttttgttttgygtttggttggtatyggyggtttgttgagtttagtttggtatttygttggtatyggyggttygtt

SEQ ID NO: 14601 - DNA, 380 bp, synthetic construct
  misc_feature 1..380: note = Description of Artificial Sequence: Synthetic polynucleotide
  source 1..380: mol_type = other DNA
ttttattaaaatataaaaaattggttgggggtggtggtaygtgtttgtagttttagttataygggaggttgaagtaggggaattgtttgaattygggaggyggagattgtagtgagtygagatygtgttattgtattttaatggtattttagtttgatgatagagygagatttygttttaaaaataataataaataaataaataaataaataaaaattagttgggygtggtggygtgtgtttgtagttttagttattygggagattgaggtaggagaatygygggaattygggaggyggaggttgtagtgagtygagatygygttattgttttgtagtatggagatagagttagatttygtttaaaaaaaaaaaaaaaaa

SEQ ID NO: 14602 - DNA, 201 bp, synthetic construct
  misc_feature 1..201: note = Description of Artificial Sequence: Synthetic polynucleotide
  source 1..201: mol_type = other DNA
aggygggyggattaygaggttaggagatygagattattttggttaatayggtgaaatttygtttttattaaaaatataaaaaattagttgggygtggyggygggtatttttagttttagttatttgggaggttgaggtaggagaatggygtgaattygggaggyggagtttgtagtgagtygagatygygttattgtattt

SEQ ID NO: 14603 - DNA, 201 bp, synthetic construct
  misc_feature 1..201: note = Description of Artificial Sequence: Synthetic polynucleotide
  source 1..201: mol_type = other DNA
aaaaattagttyggygtggtggtaygygtttgtaattttaattatttgggaggttgyggtaggtgaattatttgaagtygggaggtgaaggtygtagtaaygttgttttttgtattggatgaagtgttttttattaaatttttttatyggagagggtgggatttgygggttttttgggtggtttgatttygatattttgtg

SEQ ID NO: 14604 - DNA, 201 bp, synthetic construct
  misc_feature 1..201: note = Description of Artificial Sequence: Synthetic polynucleotide
  source 1..201: mol_type = other DNA
ayggygaattgyggygattgtgaygtgtttttttatttttttttyggtggattttttttatttgttttttttttaatttttaataagtttttattatygaygaygtgagaygaygayggtatgggattttttatttygttagggttaatgaattttatattatgagttgtatgaggtatgagggagtttttaagggaggaa

SEQ ID NO: 14605 - DNA, 201 bp, synthetic construct
  misc_feature 1..201: note = Description of Artificial Sequence: Synthetic polynucleotide
  source 1..201: mol_type = other DNA
gaygtagaagaygggtgatttttgtatttttatttgaggtatygggtttattttattagggagtgttagatagtgggtataggttagtgggtgygtatatygtgygtgagtygaagtagggtgaggtattgttttatttgggaagygtaaggggttagggagtttttttttygagttaaaggggtgayggaygtatttgga

SEQ ID NO: 14606 - DNA, 201 bp, synthetic construct
  misc_feature 1..201: note = Description of Artificial Sequence: Synthetic polynucleotide
  source 1..201: mol_type = other DNA
taaataattagggataaagagtattatattgtygaatttattttatttttaattttttttttaaattttttataaaaaattagtygggtgtggtggygggygtttgtagttttagttatttagagattgaggtaggagaatggygtgaattygggaggaggagtttgtagtaagyggagatygygttattgtattatagtt

SEQ ID NO: 14607 - DNA, 201 bp, synthetic construct
  misc_feature 1..201: note = Description of Artificial Sequence: Synthetic polynucleotide
  source 1..201: mol_type = other DNA
atttttgtgatttatattttattygtatattttttttttttttgaaaatttttaataaaaatttgttggttttayggtttaggggtattatagaatttatygatatgtgatgtttttttyggatgttyggttttaaaattttttttttttgtattttgtttttttattttttaatttggtygaygtttagggaaaatagaa

SEQ ID NO: 14608 - DNA, 201 bp, synthetic construct
  misc_feature 1..201: note = Description of Artificial Sequence: Synthetic polynucleotide
  source 1..201: mol_type = other DNA
ttttggygaatttttattgttataattttaaaaattyggtttagggaggagtttattttttattttttatataggygatatatgtagaaatataattygtygttgtgtttgtgyggttaggattttttttttataygtaatgatttagttgattagtttaagatatgttyggtttttaygtttgtttgtaggggtattgtt

SEQ ID NO: 14609 - DNA, 201 bp, synthetic construct
  misc_feature 1..201: note = Description of Artificial Sequence: Synthetic polynucleotide
  source 1..201: mol_type = other DNA
ttgggagtagaggtttttyggaaggtattatttttagagygtgtttttgagtaattttgaggatgggtttygggttattattgtgtgttggaaatagtagygtttaggttgtyggaggaggttggtttttttggtaggttttggttgtgtttagagttttgtgggttttggagataaggtttyggtttgaggtttttgggg

SEQ ID NO: 14610 - DNA, 201 bp, synthetic construct
  misc_feature 1..201: note = Description of Artificial Sequence: Synthetic polynucleotide
  source 1..201: mol_type = other DNA
gtttgagtaggataaggattttagagtttaagagaattttgatgattagagaagggttttygaggttatyggggatgtayggtttgtatttyggtttttgygggataatggaggtttttttttttttttgtgttygggttygggtttttgtagatagatttttatatttagaggtgagaaattagatataattagatattt

SEQ ID NO: 14611 - DNA, 201 bp, synthetic construct
  misc_feature 1..201: note = Description of Artificial Sequence: Synthetic polynucleotide
  source 1..201: mol_type = other DNA
ttatatgttaggttataaaataagtttttagaaatttaagaagattgaaattatattaattattttttaaaaaaaataggtggtygggygyggtggtttaygtttgtaattttagtattttgggaggtygagaygggyggattaygaggttaggagatygagattattttggttaatayggtgaaatttygtttttattaa

SEQ ID NO: 14612 - DNA, 568 bp, synthetic construct
  misc_feature 1..568: note = Description of Artificial Sequence: Synthetic polynucleotide
  source 1..568: mol_type = other DNA
ttagtatatagatataaaaatgagaggtgatagygtgttggtagtttttatagttttygttttttttyggtattttttyggttttggygtttattttggtygygtttgaggagttttttagttygtygttgtattgtgggagtttttttttgggttggataaggttggagtyggtttttttagtttgygggtaggtgtggagagagaggygtgggygggaatygtggttgtaggttgygtttgygggttagttygagtttygggtgggygtgggtttggtaagtttygtattyggagyggttagtyggttygggtagtgaggagtttagtatttgggttagtagttgttgtgttygatttttygttgggttttagttgttttttygtygggtagggttygggatttgtagttttttatgtttgagtttttattttygtygtgygtttttgtgtagtttaagttttttygaygagygttaatttttgttttayggygtttagttttatygattgtttaagggttgaggagtgygggtatayggygtyggattggtaggtagttttattt

SEQ ID NO: 14613 - DNA, 201 bp, synthetic construct
  misc_feature 1..201: note = Description of Artificial Sequence: Synthetic polynucleotide
  source 1..201: mol_type = other DNA
tttattaaaaatataaaaaattagttgggtattatggtgggtgtttgtagttttagttattygggaggttgaggtaggagaatggygtgaattygggaggyggagtttgtagtgagyggagatygygtygttgtattttagtttgggygatagagtaygagttygttttaaaaaaagaaaaaaaagaaagaaaagaaaaga

SEQ ID NO: 14614 - DNA, 201 bp, synthetic construct
  misc_feature 1..201: note = Description of Artificial Sequence: Synthetic polynucleotide
  source 1..201: mol_type = other DNA
gggttggttaaggtyggagttggttttttttgtttgyggggaggtgtggagggagaggygtaggtgggaattagggttgtgtggggygtttgtgggtaagygtgagtttygggtgggagygggttyggtaaatttattttagggtgttttgttttttataaagaaaattttttttggggtttttatgggtttttttgggat

SEQ ID NO: 14615 - DNA, 201 bp, synthetic construct
  misc_feature 1..201: note = Description of Artificial Sequence: Synthetic polynucleotide
  source 1..201: mol_type = other DNA
ttttaagtagttgggattataggtattygttattatgtttggttaattttttgtattttttagtatagatggggttttatygtgttaattaggatggtttygattttttgatttygtgatttgttygttttggttttttaaagtgtygggattataggygtgagttatygtgtttagttatatattatattttttttattt

SEQ ID NO: 14616 - DNA, 201 bp, synthetic construct
  misc_feature 1..201: note = Description of Artificial Sequence: Synthetic polynucleotide
  source 1..201: mol_type = other DNA
aattatggggtgaattttgttatggggatatgtatttggggggaaggttgtgatgggaggggtattygggttaaataygggyggttgttagtgaagagttygtaagatagagtaggagttagggggaatagggagggaggggtattttttttttttttttttgagayggagttttattttgttttttaggttggagtgtag

SEQ ID NO: 14617 - DNA, 201 bp, synthetic construct
  misc_feature 1..201: note = Description of Artificial Sequence: Synthetic polynucleotide
  source 1..201: mol_type = other DNA
tataggagtataaaagggttggyggttttgttygggtatattgttygtttttttatttattygtgtattttagtttattatttttgagttgggygtagtaygtggtttagagaaygggaagggatttaygagtgtttgatatatataattattgttgttggtgattatttttatttatgagtggygtatggatggggttag

SEQ ID NO: 14618 - DNA, 201 bp, synthetic construct
  misc_feature 1..201: note = Description of Artificial Sequence: Synthetic polynucleotide
  source 1..201: mol_type = other DNA
taaaggtttgtttttgtatttaagtatttgagtttttaagagttagttttygggtttttttggagtaaggtttygttyggttttaygtatttgtttygttygtygtgatggtgagttygttgttgggttygtttttgttaattyggtttttggygtatatgyggatgttgtaggtggaggaagggtggatattaatgatgg

SEQ ID NO: 14619 - DNA, 201 bp, synthetic construct
  misc_feature 1..201: note = Description of Artificial Sequence: Synthetic polynucleotide
  source 1..201: mol_type = other DNA
tttggttggttttgggatttgttttttggtggttaagtagtggttatgaaagtttagtygttgttatatttttgaggaatyggygtattttygtttatagyggtagttgggggtatttaygtggttyggggttgttttgatttggtagygtatgggggttgttgtttgggttttttagtgtgttatttgygygtttttygt

SEQ ID NO: 14620 - DNA, 201 bp, synthetic construct
  misc_feature 1..201: note = Description of Artificial Sequence: Synthetic polynucleotide
  source 1..201: mol_type = other DNA
ttyggygtyggtatttattagygtggttagtttggtygaagtttygyggaagggygggattaggygtygtatygtygtgtttagggattggaattggygtygttygtaggttatgaggtttattatggagtttagygtygtattttgygagaggggtggatgtgggggtygtagggattttagayggttygggatygattt

SEQ ID NO: 14621 - DNA, 201 bp, synthetic construct
  misc_feature 1..201: note = Description of Artificial Sequence: Synthetic polynucleotide
  source 1..201: mol_type = other DNA
tggttattttgggagtttgttgttgatgaattgtagtatggttatttgggtygtttattttgtatggttaygttgttyggttattgttgtaggtaygtttygtttygtttaattttttggttggtggggttattygggtgtttgtataygattttttttgagagggttagaggtyggtttaattatttgtaaataatgtta

SEQ ID NO: 14622 - DNA, 201 bp, synthetic construct
  misc_feature 1..201: note = Description of Artificial Sequence: Synthetic polynucleotide
  source 1..201: mol_type = other DNA
ttagtatataggatatttatgygtgtttattattyggtataygggagatttaygygtgtttattgtygggtataggggagatttaygygtgtttattgttyggtataygagagatttaygygtgtttatygtttggtatagggagatttaygygtgtttattgttyggtataggggagatttaygygtgtttattgttygg

SEQ ID NO: 14623 - DNA, 201 bp, synthetic construct
  misc_feature 1..201: note = Description of Artificial Sequence: Synthetic polynucleotide
  source 1..201: mol_type = other DNA
aggggaatagtaatagaagttttatttattaggtatttattgtgtgttaagtattgtgttaagggttttatagaataatagtataagaattttggtygggygtagtggtttatttttgtaattttagtattttgggaggtygaggtgggtggattaygaggttaggagttagagagattagtttagttaatatggtgaaat

SEQ ID NO: 14624 - DNA, 201 bp, synthetic construct
  misc_feature 1..201: note = Description of Artificial Sequence: Synthetic polynucleotide
  source 1..201: mol_type = other DNA
tgtaygtatygtgygygagtygaagtagggygaggtattgttttattygggaagtaygaggggttagggagtttttatttttagttaaagaaaggggtgayggaygtatttggaaaatygggttatttttattygaatattgygttttttyggygggtttaaaaaayggygtattaygagattatattttatatttggttc

SEQ ID NO: 14625 - DNA, 201 bp, synthetic construct
  misc_feature 1..201: note = Description of Artificial Sequence: Synthetic polynucleotide
  source 1..201: mol_type = other DNA
gttygttattaygttyggagaattttttgtatttttagtggagataggtttttattatgttagttaggatggtttygattttttgatttygtgatttgttygtttyggtttygtaaagtgttgggattataggygtgaggtatagygttyggtttygattgttttatttaaagtaatgaaagtatagttggttttaaagga

SEQ ID NO: 14626 - DNA, 201 bp, synthetic construct
  misc_feature 1..201: note = Description of Artificial Sequence: Synthetic polynucleotide
  source 1..201: mol_type = other DNA
tttgyggttagttggattaggtggtyggtagygagayggaataagtagattaggttgagggtgaaggygtaggygattagtagtatggataagaggttgtygtttgttattttttttatygtttggtttagtatttatttattygtttgtagtaagtttagtagtattatttyggtygtygtygttattttattttgtygg

SEQ ID NO: 14627 - DNA, 201 bp, synthetic construct
  misc_feature 1..201: note = Description of Artificial Sequence: Synthetic polynucleotide
  source 1..201: mol_type = other DNA
ttagattgttttttttttgagatagagtttygttttgttatttaggttagagtgyggaggygygattttagtttattgtaagtttygtttttygggtttaygttatttttttgttttagttttgygagtagttgggattataggygtttgttatygygtyggttaatttttttggtatttttagtagagatagggttttat

SEQ ID NO: 14628 - DNA, 201 bp, synthetic construct
  misc_feature 1..201: note = Description of Artificial Sequence: Synthetic polynucleotide
  source 1..201: mol_type = other DNA
atagtttattaaaaatataaaaaaaaaaaaaaaaaaatttgtygggtgtggtggtgtgtgtttgtaattttagttatttgggaggttgaggtaagagaatygattgaattygggaggtagagattgtagtgagtttagattatgttattgtattttagtttggataagagtgagattttattttaaaaataaaaataaaaa

SEQ ID NO: 14629 - DNA, 201 bp, synthetic construct
  misc_feature 1..201: note = Description of Artificial Sequence: Synthetic polynucleotide
  source 1..201: mol_type = other DNA
tgtttttttttgttttgagatggagttttattttattgtttaggttggagtgtagtggtgttattttggtttattgtaatttttatttttygggttttagygatttttttgttttagttttttaagtagttgggattgtaggtgtttataattaygttyggttaatttttgtgtttttagtagagtyggagttttattatg

SEQ ID NO: 14630 - DNA, 201 bp, synthetic construct
  misc_feature 1..201: note = Description of Artificial Sequence: Synthetic polynucleotide
  source 1..201: mol_type = other DNA
tgtttgttattaagtttagttaatttttgtatttttagtagagayggggttttattgtgttggttaggttggtttygaatttttgatttygtgattygttygttttggttttttaaagtgttaggattataagtgtgagttatygygttyggttttttaaatggtatttttgattttttttttttagtttttaaagtaggt

SEQ ID NO: 14631 - DNA, 201 bp, synthetic construct
  misc_feature 1..201: note = Description of Artificial Sequence: Synthetic polynucleotide
  source 1..201: mol_type = other DNA
gttaaggtgggyggattatttgaggttaggagttygagattagtttggttaatatggtgaaattttatttttattaaaaatatggaaaaaattagtygggyggggttygagtttgtaattttagttatttgggagttgaggygygagaatygtttgaagtygggagggggaggttgtaggagtagaggttgtgttattgta

SEQ ID NO: 14632 - DNA, 201 bp, synthetic construct
  misc_feature 1..201: note = Description of Artificial Sequence: Synthetic polynucleotide
  source 1..201: mol_type = other DNA
ggtttgtatggtgygtgattatttttagtggaagttttaatatgggtgtggtttagttttttagggttttttaaggtagaggtggttygggtttttgtagygattttataatatattttaattgtagayggtggagattgygggttgtttttyggtttaagyggttttggggttttygttttgygyggagttattygtgtt

SEQ ID NO: 14633 - DNA, 201 bp, synthetic construct
  misc_feature 1..201: note = Description of Artificial Sequence: Synthetic polynucleotide
  source 1..201: mol_type = other DNA
gygttttgggttattgagagaagtgaaatattgtagatayggtagaggtgtttttttttttttttygtttttagatgtggtttttataygtaggttgatgygttttttttttatttaygtttgttyggttttgttatatatgtygttgtgttgtyggttttgaatgtgtatgagyggttygtgttggggttagyggaggtt

SEQ ID NO: 14634 - DNA, 234 bp, synthetic construct
  misc_feature 1..234: note = Description of Artificial Sequence: Synthetic polynucleotide
  source 1..234: mol_type = other DNA
aggggttatatttatggatttttttttttttggtaggaagatgagtgattatattttygttattattgaattgagygttttgtttgttyggygttagtatygtttgtattattatttygattttatttattatygttyggyggatgggyggaggtttyggtaggtttgtgatatggtgtattattttattattgaagttatttaggaayggyggygggtattgygttagtaggg

SEQ ID NO: 14635 - DNA, 201 bp, synthetic construct
  misc_feature 1..201: note = Description of Artificial Sequence: Synthetic polynucleotide
  source 1..201: mol_type = other DNA
ggggttttttgtttttagtatygttagtttaggtgtgttttttatggygtgatgygtttgtagatttggaaatattataggatttaggtattttayggagygttygttttgtgttagttttagtttagygttttttagatatygtttgatttttyggaggtagttatygatattgygtttattgtatagatgagaaagttg

SEQ ID NO: 14636 - DNA, 201 bp, synthetic construct
  misc_feature 1..201: note = Description of Artificial Sequence: Synthetic polynucleotide
  source 1..201: mol_type = other DNA
tttttagtgagatgaattyggtattttagatggaaatgtagaaattattygttttttgygtygtttaygttgggagttgtagatyggagttgtttttattyggttattttggttttttttttttgttttttttttgagatagtgtttttttttatttttgttatttaggttgtagtgtagtggygyggtttgtgtttattg

SEQ ID NO: 14637 - DNA, 201 bp, synthetic construct
  misc_feature 1..201: note = Description of Artificial Sequence: Synthetic polynucleotide
  source 1..201: mol_type = other DNA
taattttattttgtttttgagatagagtttygttttgtygtttaggttggagtgtagtggygtaatttyggtttattgtaagtttygtttttygggtttaygttattygtttgttttagttttttgaataattgggattataggygttygttattaygttyggttaaatttttgtatttttagtagagayggggttttatc

SEQ ID NO: 14638 - DNA, 201 bp, synthetic construct
  misc_feature 1..201: note = Description of Artificial Sequence: Synthetic polynucleotide
  source 1..201: mol_type = other DNA
atttttagggttgyggatggtagaattaaaagagttaattagtaagtagaatygtttttttyggggttttaaggtttgagtattttttttggggtgttatygtatttttttyggggtgatatgtttggtttagttgtaagttttgtttagaatttgtttgtgtatyggtgtttggaatagttagttggattttatatttat

SEQ ID NO: 14639 - DNA, 201 bp, synthetic construct
  misc_feature 1..201: note = Description of Artificial Sequence: Synthetic polynucleotide
  source 1..201: mol_type = other DNA
ggtttttgtagggagtttatattagtagttttttattttgaggagataygygggtttttttttygaagttygtttaggaggtagatggagygattygattyggaggataggagggtgtttaggggttttggygttatagtttttataggatgattttggagygtttttggatttygagttgttttggttaaggagtygtat

SEQ ID NO: 14640 - DNA, 201 bp, synthetic construct
  misc_feature 1..201: note = Description of Artificial Sequence: Synthetic polynucleotide
  source 1..201: mol_type = other DNA
tatatataggygtggatatttatatggttttyggtagtgttgtaggaggttagtatagagaygtgttgaggagtttgagatgttygtttttttgggttatygygtgtaaaggttgttttygttgtggatttttatatgtgtgatatatatgaataggygaaayggataygtayggtttttatataygtgagttgggttttt

SEQ ID NO: 14641 - DNA, 201 bp, synthetic construct
  misc_feature 1..201: note = Description of Artificial Sequence: Synthetic polynucleotide
  source 1..201: mol_type = other DNA
tttttgtgaaggtattaagtayggtagaygtttttatatygtyggggttygtttttttgtggaygggaagtgggaaygtgaygtggaygtgaygtgggaaygtaaygtgaygtgaygtgaygtgaygtggtatggygygaggatagygyggygggagyggygttttagatttagtagggagggagaygaaaggyggatgga

SEQ ID NO: 14642 - DNA, 201 bp, synthetic construct
  misc_feature 1..201: note = Description of Artificial Sequence: Synthetic polynucleotide
  source 1..201: mol_type = other DNA
gttgggygtggtggtaygtgtttgtagttttagttatttaggaggttgaggtaggagaattttttgaattygggaygtagaggttgtagtgagttgagatygygttattgtattttagtttggtaatagagtgagatttyggtttaaaaaaaaaaaaaaagaaaaaaaaaaaaaaaagaaggagttgaggttttaagaatt

SEQ ID NO: 14643 - DNA, 201 bp, synthetic construct
  misc_feature 1..201: note = Description of Artificial Sequence: Synthetic polynucleotide
  source 1..201: mol_type = other DNA
ttgtattttgtgggtaggggatattttttttagtggttggtgatgattgtgattttatttgtygagttttgtgggagtttyggtagtttttygtaattgtyggttggttgttattgttttagygtttgttttttgattggttagtaaattayggtggtagatagaaaaaagatagtttttttttttagggttgttttataa

SEQ ID NO: 14644 - DNA, 201 bp, synthetic construct
  misc_feature 1..201: note = Description of Artificial Sequence: Synthetic polynucleotide
  source 1..201: mol_type = other DNA
ttttgttggygtattttgttggygtattttgttggygtattttgttggygtattttgttggygtattttgttggygtattttgttggygtattttgttggygtaagttgygttttgggattgggtttgaaaagggaggagttatttattttaagtttttaggttyggggagaattttatagtaagttttttgggagtttga

SEQ ID NO: 14645 - DNA, 686 bp, synthetic construct
  misc_feature 1..686: note = Description of Artificial Sequence: Synthetic polynucleotide
  source 1..686: mol_type = other DNA
gtggtatttgtaggtttttaggattaggtagaggatttagtttttttaggattggggtttyggygttgygttttaggggaggtygaygggggttgggaggygtttagggygggaatttagygtaygggtgaggattttaaaaagtaaggggtaggatgagttaataaggttttgagtaggaaaattatgygataggaagtgtatatattgttttatagtagaaagatyggggaygggattagtttttaagygattttaaatttaaaaggaagtaatttttagatttttatgggygttttaatttgttttgggtgaaggaagataggtaagaatttttaggtttgtgaggattttaygttttagggatagaagtgttagggatttgggaagtgtagatttaatataaggtagagtaaaatttaygygtttyggtaggatttttattttaygtgatttattttygggtttgttgygtaggatagaagttagtttygggtggggttttygaatatggtggyggggtttgggtgggatagaggyggggygygaggyggagagattttgttttttagaataggtaaagggyggggtygggattagatttgtgtattttttygtttygtatttagygtttttgtttttygggtgtttggaggtgagagyggttaggaaggttgaggtatgat

SEQ ID NO: 14646 - DNA, 201 bp, synthetic construct
  misc_feature 1..201: note = Description of Artificial Sequence: Synthetic polynucleotide
  source 1..201: mol_type = other DNA
gttagagtgtagtggtgygatttyggtttattgtaagtttygtttttygggtttaygttatttttttgttttagtttttttagtagttgggataggggtaygtygttaygttyggttagtttttgtatttttagtagagayggggttttattatattagttaggayggtttygattttttgatttygtgatttgttagttt

SEQ ID NO: 14647 - DNA, 201 bp, synthetic construct
  misc_feature 1..201: note = Description of Artificial Sequence: Synthetic polynucleotide
  source 1..201: mol_type = other DNA
gttagagattttgtttttaaaagtaaaaaagaaaaaaaaagtttttttttaagttattatatattttgaataattaatattgaaaattgttggtygggygyggtggtttaygtttgtaattttagtattttgggaggtygaggyggggyggattaygagattagtagaayggygtgaattyggaaggyggagtttgtagtg

SEQ ID NO: 14648 - DNA, 201 bp, synthetic construct
  misc_feature 1..201: note = Description of Artificial Sequence: Synthetic polynucleotide
  source 1..201: mol_type = other DNA
ttgtatttttatttgaggtatygggtttattttattagggagtgttagatagtgggygtaggttagtgggtgygtgtatygtgtgygagtygaagtagggygaggtattgttttatttgggaagygtaaggggttagggagttttttttttgagttaaagaaaggggtgayggaygtattttgaaaatygggttattttta

SEQ ID NO: 14649 - DNA, 201 bp, synthetic construct
  misc_feature 1..201: note = Description of Artificial Sequence: Synthetic polynucleotide
  source 1..201: mol_type = other DNA
aygtatttattgatttgygtttattgtttggtagtttttagtgagatgaattyggtattttagttggaaatgtagaaattattattttttgtgtygtttaygttgggagttgtagatyggagttgtttttattyggttatgttggttttttttttggatataattatttttgtatttatttaatttttatttttatggaat

SEQ ID NO: 14650 - DNA, 201 bp, synthetic construct
  misc_feature 1..201: note = Description of Artificial Sequence: Synthetic polynucleotide
  source 1..201: mol_type = other DNA
tttttatgtgattattgtttgtttgttagygttagttttttttgattttaaattataagtggaagaaagtaygttagaaatttatagaattggttyggygyggtggtttaggtttgtaattttagtattttgggaggtygaggtaggyggattaygaggttaggagatygagattattttggttaatagggtgaaatttyg

SEQ ID NO: 14651 - DNA, 201 bp, synthetic construct
  misc_feature 1..201: note = Description of Artificial Sequence: Synthetic polynucleotide
  source 1..201: mol_type = other DNA
aagttttttttttttttttttttttttttttttgagayggagttttattttttygtttaagttggattgtagtggygttatttyggtttattgtaagtttygttttttgggtttatgttatttttttgttttagtttttygagtagttgggattataggygtttattattaygttyggttaattttttgtatttttagtag

SEQ ID NO: 14652 - DNA, 201 bp, synthetic construct
  misc_feature 1..201: note = Description of Artificial Sequence: Synthetic polynucleotide
  source 1..201: mol_type = other DNA
ygtttggtgtatgttgtggagggygtgggtaatggygtatatygtattaattataaattgtattttgtttttttgttygtaggtggagtttyggtygatgygtttttygtttgttttagggatgtttagagaaagtgtgttyggtttttatgtatygaattyggtttttygttttttttttttttatttttattatttttt

SEQ ID NO: 14653 - DNA, 201 bp, synthetic construct
  misc_feature 1..201: note = Description of Artificial Sequence: Synthetic polynucleotide
  source 1..201: mol_type = other DNA
gattttagggggttttattttagyggttttttttattttttttgtagagaaaaaagagtgtyggygggattatygtttatygtgtgtttaggaggygtttygtaatatggtgtattttaatgtgatttgygatggttgtaatgggtttgtggtaggaattygttataagtgtagygtttgtttagattaygatttgtgtag

SEQ ID NO: 14654 - DNA, 201 bp, synthetic construct
  misc_feature 1..201: note = Description of Artificial Sequence: Synthetic polynucleotide
  source 1..201: mol_type = other DNA
ggtattttatttatttagagatagagtttygttgygaygtttaggttggagtgtatggygtaattttggtttattgtaggtttygtttttygggttttagygatttttttgttttagtttttygagtagttggggttatagttatgtgttattaygtygggttaatttttgtatttttagtagagatagggtttttttata

SEQ ID NO: 14655 - DNA, 201 bp, synthetic construct
  misc_feature 1..201: note = Description of Artificial Sequence: Synthetic polynucleotide
  source 1..201: mol_type = other DNA
ttattatgtttaattaattttttttatttgtagtagagatagggttttattgtgttagttaggatggtttygattttttgattttgtgattygygtgtttyggttttttaaagtgttgggattataggygtgagttatygygttyggtttgtaaatattttttgygttttagtgggttatgtttttattttgttgattgtt

SEQ ID NO: 14656 - DNA, 227 bp, synthetic construct
  misc_feature 1..227: note = Description of Artificial Sequence: Synthetic polynucleotide
  source 1..227: mol_type = other DNA
ttagttttttgagtagttggaattataggtgttygttattaygttyggtttattttttgtatttttagtagagayggggttttattatgttagttaggatygttttgattttttgatttygtgattygtyggtttyggttttttaaagtgttgggattataggygtgagttattaygtttagttttagaaattgaaatgtatattattaagtgaaagaagttaattt

SEQ ID NO: 14657 - DNA, 201 bp, synthetic construct
  misc_feature 1..201: note = Description of Artificial Sequence: Synthetic polynucleotide
  source 1..201: mol_type = other DNA
tttttttttagttttgttgttattttgtagtttgattttagattgttgtgttagtaattagygagatttygagttaggtgtgggatataatttygtggtgygtygttttttaagtyggtyggaaaagygtaatattygggtgggagtgattygattttttaggtgygttygttatttttttttttgattyggaaagggaat

SEQ ID NO: 14658 - DNA, 201 bp, synthetic construct
  misc_feature 1..201: note = Description of Artificial Sequence: Synthetic polynucleotide
  source 1..201: mol_type = other DNA
aggtgygtttgttatttttttttttgattyggaaagggaattttttgattttttgygttttttaagtgaggtaatgtttttttttgtttyggttygygtayggtgtatgtttttattgatttgygtttattgtttggtttttttaagtgagatgaattyggtattttagatggaaatgtagaaattattygttttttgygt

SEQ ID NO: 14659 - DNA, 201 bp, synthetic construct
  misc_feature 1..201: note = Description of Artificial Sequence: Synthetic polynucleotide
  source 1..201: mol_type = other DNA
tgtttttttgttttagtgtttatattgtaaaaaagtgttttttttatygggygyggtggtttaygtttgtaattttagtattttgggaggtagaggygggyggattaygaggttaggagatygaaattattttggttaatayggtgaaatttygtttgtattgtgaatataaaaaattagtygggygtggtggygggtgtt

SEQ ID NO: 14660 - DNA, 201 bp, synthetic construct
  misc_feature 1..201: note = Description of Artificial Sequence: Synthetic polynucleotide
  source 1..201: mol_type = other DNA
gtygggygtggtggygggtatttgtagttttagttattygggaggttgaggtaggagaatggggtgaattygggaggyggagtttgtagtgagtygagatygygttattgtattttagtttgggtgatagagygagattttattttaaaaaaaaataatattaggattgaagtttgttttttaatttttagtgatayggtt

SEQ ID NO: 14661 - DNA, 201 bp, synthetic construct
  misc_feature 1..201: note = Description of Artificial Sequence: Synthetic polynucleotide
  source 1..201: mol_type = other DNA
tgaataagaaagggttattatattttattttgaaatggtttttggagaaagaatggaagtaaattgtataagtgggygtttatttttttttattyggttayggttatygtggtgttyggttaggtttttggtgaygtgaggtaaattttttygttggtaaattagtttatatattttttttattgtagayggttatttaga

SEQ ID NO: 14662 - DNA, 201 bp, synthetic construct
  misc_feature 1..201: note = Description of Artificial Sequence: Synthetic polynucleotide
  source 1..201: mol_type = other DNA
ttaagtatttttttgtgattygtttagaggaatttttggtagtggggatggygttatttttatttgagagatgaggagattgaggtttagaggggggaygyggtttgttygagttatattgattgagaggggtagatttggattygtttgtagtttaagtttttagagattttggtgtggtttgtygggtagttagtttgt

SEQ ID NO: 14663 - DNA, 201 bp, synthetic construct
  misc_feature 1..201: note = Description of Artificial Sequence: Synthetic polynucleotide
  source 1..201: mol_type = other DNA
gtgtgattttggaggggtaagaattatttyggtagttatgggggagtttaygagtgtttgataagaggttaygtttttttgggattttttagaaagttagyggaggggtyggggatagtagttgttttgggtttaaggtgagtagtattgtygtttttgaggatggygtgtaggtgaaggtattgtygattttaggttggg

SEQ ID NO: 14664 - DNA, 201 bp, synthetic construct
  misc_feature 1..201: note = Description of Artificial Sequence: Synthetic polynucleotide
  source 1..201: mol_type = other DNA
ttyggatatttaggttattttygaattttaaggtttttaatygtagttataygtatagaggtttttttgttatgtggggtaatayggttatagggtaagayggttaygggttttagatatttttgggttattattttgtttatygtaggtggatatagttatggaatggaagtaatttttttgattatttayggtagtttt

SEQ ID NO: 14665 - DNA, 201 bp, synthetic construct
  misc_feature 1..201: note = Description of Artificial Sequence: Synthetic polynucleotide
  source 1..201: mol_type = other DNA
gattttttygagtttgtygggagatagttaygttaatggttataaygggtatagygtttaggaaygtagtaatttagttagtygttagttttttttttggygygggtattatttaaygygtttatttggggtttagatgygataaattggtygagggattttgggttttggttgggaygagygtagtaaatttgtygttat

SEQ ID NO: 14666 - DNA, 201 bp, synthetic construct
  misc_feature 1..201: note = Description of Artificial Sequence: Synthetic polynucleotide
  source 1..201: mol_type = other DNA
ttttgaatagtagtaggtagtagagttttagggagagtaggttttygtggtgtagtattayggttttgtgttttatttyggagaagttgayggagatgtgygtttyggggatgggttttaggattagttttttygyggtttggtygttgttygggagyggttgtyggyggatggtgtagtgtagaggtaggatgtyggggg

SEQ ID NO: 14667 - DNA, 201 bp, synthetic construct
  misc_feature 1..201: note = Description of Artificial Sequence: Synthetic polynucleotide
  source 1..201: mol_type = other DNA
atagggttttattttgttagttaggatggtttygattttttgatttygtgattygttagtttyggttttttaaagtgttgggattataggygtgagttatygtattgggttggtagttattttttttaagtagtagttttattttttagtataaattaatgttgtagtttttaaattatttgttgaagtgtttttgaattt

SEQ ID NO: 14668 - DNA, 201 bp, synthetic construct
  misc_feature 1..201: note = Description of Artificial Sequence: Synthetic polynucleotide
  source 1..201: mol_type = other DNA
ttttttttttttttttgagatagaattttgttttgttgtttaggttggagtatagtggtgygatattagtttattgtaaattttatttttygggtttaagygatttttttgttttagttttttgagtatttgggattatagggagtgtttttatatttggttaattttttgtatttttagtagagatagggttttatygtg

SEQ ID NO: 14669 - DNA, 201 bp, synthetic construct
  misc_feature 1..201: note = Description of Artificial Sequence: Synthetic polynucleotide
  source 1..201: mol_type = other DNA
aatagttgggygyggtggtttatatttgtaattttagtattttgggaggttgaggygggtagattaygaggttaggaaatygagattattttggttagtayggtgaaatttygtttttattaaaaatataaaaaaaattagtygggygttgtggyggaygtttgtagttttagttatttttaaggttgaggtaggagaatg

SEQ ID NO: 14670 - DNA, 201 bp, synthetic construct
  misc_feature 1..201: note = Description of Artificial Sequence: Synthetic polynucleotide
  source 1..201: mol_type = other DNA
ttgattyggaaagggaattttttgattttttgygttttttaagtgaggtaatgttttgttttgttttggttggygtayggtgygygtatttattgatttgygtttattgtttggttttttttagtgagatgaattyggtattttagatggaaatgtagaaattattygttttttgtatygtttaygttgggagttgtagat

SEQ ID NO: 14671 - DNA, 201 bp, synthetic construct
  misc_feature 1..201: note = Description of Artificial Sequence: Synthetic polynucleotide
  source 1..201: mol_type = other DNA
tttttattttgttttttagatagaatttygttgtgttatttaggttggagtgtagtggygtgattttggtttattgtaatttttgtttttygggtttaygygatttttttgttttagttttttaagtagttgggattgtaggtgtgtattattatgtttatattaagtttttgtatttttagtagagatggggttttgtta

SEQ ID NO: 14672 - DNA, 201 bp, synthetic construct
  misc_feature 1..201: note = Description of Artificial Sequence: Synthetic polynucleotide
  source 1..201: mol_type = other DNA
tagtgaaatttygtttttattaaaaatataaaaaattagttyggygtggtgaagggtatttgtagtygtagttatttaggaggttgaggtaggagaatggygtgaattygggaggtggagtttgtagtgaatygagattaygttattgtattttagtttgggygatagagtgagattttgttttaaagaaatagaagattt

SEQ ID NO: 14673 - DNA, 201 bp, synthetic construct
  misc_feature 1..201: note = Description of Artificial Sequence: Synthetic polynucleotide
  source 1..201: mol_type = other DNA
ttttgtgaaaaataaaaaaaataagtygggygyggtggtttaygtttgtaattttagtattttgggaggtygaagtaggtagattaygaggttaggagatygagattattttggttaaygyggtgaaatttygtttttattaaaaatataaaatattagtygggygtagtggygggygtttgtagttttagttattyggga

SEQ ID NO: 14674 - DNA, 201 bp, synthetic construct
  misc_feature 1..201: note = Description of Artificial Sequence: Synthetic polynucleotide
  source 1..201: mol_type = other DNA
gagttaaagtgataygtttgtttgggttttttaaagtgttggaattatagatttgagttatygggtttagtttaattattttttttagtttgagtatgagygtyggaagaaaagtttttatttgtatttattttttttagatatagggtttttttttgttatttaggttggagagtagtggygtaattttygttyggttta

SEQ ID NO: 14675 - DNA, 201 bp, synthetic construct
  misc_feature 1..201: note = Description of Artificial Sequence: Synthetic polynucleotide
  source 1..201: mol_type = other DNA
ggagtatgaggtaggagagttatttgaattygggaggtagaggttgttgtgagtygagattatatttttttattttagtttgagtggtagagtaagatttygttttaaaaaaaaaaaaaaaaagttgggggaaggagagaaaaatagagagtttagtggggtaattttttatttagtttttgttatttgttattgttttag

SEQ ID NO: 14676 - DNA, 201 bp, synthetic construct
  misc_feature 1..201: note = Description of Artificial Sequence: Synthetic polynucleotide
  source 1..201: mol_type = other DNA
atatttggtttttgggatttgtatatttttgttttttttgggtggaaagayggtttttttgattagggtttttttgtgttttagagggtaygttttttttygtaagtgtgagtygtatattagtgagtatgtgtttttatttttagggatatyggttattaggtttggggttagatggtaggattttygttttttttttta

SEQ ID NO: 14677 - DNA, 201 bp, synthetic construct
  misc_feature 1..201: note = Description of Artificial Sequence: Synthetic polynucleotide
  source 1..201: mol_type = other DNA
ttataggygttygttattaygttyggttaattttttgtgttttgtttagtagagayggggttttatygtattagttaggatggtttygatttgttgatttygtgattygttygtttyggttttttaaagtgttgggattataggygtgagttattttgygttyggtttttttatttttatattttaaattagagatgattt

SEQ ID NO: 14678 - DNA, 217 bp, synthetic construct
  misc_feature 1..217: note = Description of Artificial Sequence: Synthetic polynucleotide
  source 1..217: mol_type = other DNA
tataggygttttttattaygttyggttaattttttgtatttttagtagagayggggttttatygygttagttaggatggtttygattttttgattgagatygygtttttttgatygygttyggtygattttttttttttttttatttgttttttttttttttattattattaaaagtttattgttttatatttttttttttttaattttatttaaaa

SEQ ID NO: 14679 - DNA, 217 bp, synthetic construct
  misc_feature 1..217: note = Description of Artificial Sequence: Synthetic polynucleotide
  source 1..217: mol_type = other DNA
ggtttatagtttttagtttgagygaygtagaagaygggtgatttttgtatttttatttgaggtatygggtttattttattagggagtgttagatagtgggygtaggttagtgagtgygtgtatygtgygygagtygaagtagggygaggtattgttttatttgggaagggtaaggggttagggagtttttttttttagttaaagaaaggggtgaygg

SEQ ID NO: 14680 - DNA, 201 bp, synthetic construct
  misc_feature 1..201: note = Description of Artificial Sequence: Synthetic polynucleotide
  source 1..201: mol_type = other DNA
gttygttattaygttyggttaaatttttgtatttttagtagagatggggttttattttgttaattaggatggtgtygattttttgatttygtgattygttygttttggttttttaaagtgtygggattataggygtgagttattgygttyggtttggaaattgttttttatgtagttgatttattttaatttttattagta

SEQ ID NO: 14681 - DNA, 201 bp, synthetic construct
  misc_feature 1..201: note = Description of Artificial Sequence: Synthetic polynucleotide
  source 1..201: mol_type = other DNA
tatatgattttgaataagttttgaattatttatatgtgatttttyggttttatatgaggtagaatagtayggtgtggatygggaattttgaygtgggagtygaaagatggggaggttgtgggtayggttttyggagtttygggattgagatatgtaggtattttagaygggtttgttgttataataagtgggaaattttta

SEQ ID NO: 14682 - DNA, 201 bp, synthetic construct
  misc_feature 1..201: note = Description of Artificial Sequence: Synthetic polynucleotide
  source 1..201: mol_type = other DNA
tttagagaagattyggtagtttttttagttttyggtttttgttttygttttttttttttttgtttttaggttttttttttgtagttttttagttttttatygygttttgygtttttggttttttttttttttagtgttttttttatttggygtygttyggtygtaattttggtttttttggggaagaggttyggattttat

SEQ ID NO: 14683 - DNA, 201 bp, synthetic construct
  misc_feature 1..201: note = Description of Artificial Sequence: Synthetic polynucleotide
  source 1..201: mol_type = other DNA
tgtttttatattggaaaaatttaaatatttttaagagtttgattattggtygggygyggtggtttaaygtttgtaattttagtattttgggaggtygaggyggtyggattataaggttaggagatygtgattattttggttaatayggtgaaatttygattttattaaaaaaatataaaaaaattagtygggygyggtggc

SEQ ID NO: 14684 - DNA, 201 bp, synthetic construct
  misc_feature 1..201: note = Description of Artificial Sequence: Synthetic polynucleotide
  source 1..201: mol_type = other DNA
gatttggttgtttagaagygtgtgttatttyggattgagttaagatggtygaataggaatagtttyggtttatagtttttattgtgagygaygtagaagaygggtgatttttgtatttttatttgaggtatygggtttattttattagggagtgttagatagtgggtgtaggttagtgggtgygygtatygtgygtgagtt

SEQ ID NO: 14685 - DNA, 201 bp, synthetic construct
  misc_feature 1..201: note = Description of Artificial Sequence: Synthetic polynucleotide
  source 1..201: mol_type = other DNA
ttttggtygggygtygtggtttaygtttgtaattttagtgagaggtgatagtatgttggtagttttygtagtttttttttattagygygattttygggtgygygtgggttgggttggttygtatttggagyggttagtagtttygggtagtgaggggtttagtatttgggttagtagttgttgtgttygatttttygttag

SEQ ID NO: 14686 - DNA, 201 bp, synthetic construct
  misc_feature 1..201: note = Description of Artificial Sequence: Synthetic polynucleotide
  source 1..201: mol_type = other DNA
tgtggtygggygyggtggtttatttttgtaattttagaattttgggaggtygaggygggyggattaygagattagtagattgagattattttggttaatayggtgaaatttygtttttattaaaaatatagaaaaagtagtygggygtggtggygggtatttgtagttttagttataggttgaggtagaagaatggygtga

SEQ ID NO: 14687 - DNA, 201 bp, synthetic construct
  misc_feature 1..201: note = Description of Artificial Sequence: Synthetic polynucleotide
  source 1..201: mol_type = other DNA
tttyggttttttaaagtgttggggttataggygtgagttatygygttyggttagtygtttttattaaaaatataaaaaattagtttggygtggtggygggygtttgtagttttagttatttyggaggttgaggtaggggaattgtttgaatttatgaggyggaggttttaagtygaggtygtgttattgtattttagtttg

SEQ ID NO: 14688 - DNA, 201 bp, synthetic construct
  misc_feature 1..201: note = Description of Artificial Sequence: Synthetic polynucleotide
  source 1..201: mol_type = other DNA
ggttggagtgtagtggygtgatttyggttygttataatttttattttttagtagtttgttttggttttttaaagtgtygagattgtagtttttgttyggtygttatttygtttgagaagtgaggagygtttttgtttggtygttattttatttaggaagtgaggagygttttttttyggtygttattttatttgggaagtg

SEQ ID NO: 14689 - DNA, 201 bp, synthetic construct
  misc_feature 1..201: note = Description of Artificial Sequence: Synthetic polynucleotide
  source 1..201: mol_type = other DNA
gttttagttgttttttygyggggtagggttygggatttgtagttygttatgtttgagttttttatttttttygtgggtttttgtgyggttygagttttttygaygagygttattttttgttttayggtatttagttttattgattatttaagggttgaggagtgygggygtatagtatygggattggtaggtagttttatt

SEQ ID NO: 14690 - DNA, 286 bp, synthetic construct
  misc_feature 1..286: note = Description of Artificial Sequence: Synthetic polynucleotide
  source 1..286: mol_type = other DNA
gaagaygggtgatttttgtatttttatttgaggtatygggtttattttattagggagtgttagatagtgggygtaggttagtgggtgygygtatygtgygygagtygaagtagggygaggtattgttttatttgggaagygtaaggggttagagagtttttttttygagttaaataaatgggtgayggaygtatttggaaaatygggttatttttattygattattgygttttttagatyggtttaaaaaayggtgtattaygagattatattttatatttggttc

SEQ ID NO: 14691 - DNA, 201 bp, synthetic construct
  misc_feature 1..201: note = Description of Artificial Sequence: Synthetic polynucleotide
  source 1..201: mol_type = other DNA
gttttagttgtttttttgyggggtagggtttgggatttgtagtttgttatgtgtgagtttttttttattgttttaggtttttgtgtagtaggagttttttygaygagtatygttttttgttttatggtattyggttttatygattgtggaayggttgaggagygtgggtataaggtatgggattggtaggtagttttgttt

SEQ ID NO: 14692 - DNA, 201 bp, synthetic construct
  misc_feature 1..201: note = Description of Artificial Sequence: Synthetic polynucleotide
  source 1..201: mol_type = other DNA
ggagtgtaatggtattatttyggtttattgtaattttygtttttygggtttaggygatttttttgttttagtttttygagtatttgggattataggygygygtttttaygtttaattaatttttgtatttttagtagagayggagttttattatgttggttaggttygtttygaatttttgatttygtgatttattygttt

SEQ ID NO: 14693 - DNA, 201 bp, synthetic construct
  misc_feature 1..201: note = Description of Artificial Sequence: Synthetic polynucleotide
  source 1..201: mol_type = other DNA
ttttygttatttttttttttgattyggaaagggaattttttgattttttgygtttttygagtgaggtaatgtttygttttgtttyggttygygtatattgygtatatttattgatttgygtttattgtttggtattttttagtgagatgaattyggtattttagatggaaatgtagaaattattygttttttgygtygttt

SEQ ID NO: 14694 - DNA, 201 bp, synthetic construct
  misc_feature 1..201: note = Description of Artificial Sequence: Synthetic polynucleotide
  source 1..201: mol_type = other DNA
gaygtagaagaygggtgatttttgtatttttatttgaggtatygggtttattttattagggagtgttagatagtgggygtaggttygtgggtgtatgtatygtgtgygagttgaagtagggygaggtattgttttatttyggaagygtagggggttagggagtttttttttttagttaaagaaaggggtgatagayggtat

SEQ ID NO: 14695 - DNA, 201 bp, synthetic construct
  misc_feature 1..201: note = Description of Artificial Sequence: Synthetic polynucleotide
  source 1..201: mol_type = other DNA
tttagttaattttttttatatttttaatagagatagggttttattatgttggttaggatagttttgattttttgatttygtgattygttygtttyggtttygtaaagtgttgggattataggygtgagttatygtattyggttggaagtatatattttaatagttttatatagtagttgttgttagaatttaaatgaagat

SEQ ID NO: 14696 - DNA, 201 bp, synthetic construct
  misc_feature 1..201: note = Description of Artificial Sequence: Synthetic polynucleotide
  source 1..201: mol_type = other DNA
tagaagaygggtgatttttgtatttttatttgaggtatygggtttattttattagggagtgttagatagtgggygtaggttagtgtgtgtgygtatygtgygygagtygaagtagggygaggtattgttttatttgggaagygtaaggggttagggagttttttttttgagttagggaaaggggtgayggatggtatttgg

SEQ ID NO: 14697 - DNA, 201 bp, synthetic construct
  misc_feature 1..201: note = Description of Artificial Sequence: Synthetic polynucleotide
  source 1..201: mol_type = other DNA
ttggtagggtyggtyggttgtttttagtgyggggtttgttaagtttaygtttattyggaattttagttggttygtaagtattatgtatagtttgggttttygtttaygtttttttatttatatttttttgtaagttgagggagygggttttggttttggttagtttagaaaggggtttttatagtgtagyggtgggttgaa

SEQ ID NO: 14698 - DNA, 201 bp, synthetic construct
  misc_feature 1..201: note = Description of Artificial Sequence: Synthetic polynucleotide
  source 1..201: mol_type = other DNA
tttgagattttygtagtttyggggtttgagttgaggggttatyggtagtgtygtgggagttaggttgttttttyggaagttaggttgtttttgagtagagyggaggttttatygtttttyggggggtayggtggtagtttttaggttgtattggggttggatgagttgggggtggagtataaggggttagttttttttttt

SEQ ID NO: 14699 - DNA, 201 bp, synthetic construct
  misc_feature 1..201: note = Description of Artificial Sequence: Synthetic polynucleotide
  source 1..201: mol_type = other DNA
aaatttttygtttgtagggggygggtggggaggtggaggaggggttgggttaaaygttgggggtgtgattyggggttgygggttttygggttttagttttygggtttgtygagtgggygagtggggtgttttattttttgyggttttttttyggtttttatagaatatggagaaggygattttgtygtyggtgaygtttat

SEQ ID NO: 14700 - DNA, 201 bp, synthetic construct
  misc_feature 1..201: note = Description of Artificial Sequence: Synthetic polynucleotide
  source 1..201: mol_type = other DNA
gggygtttgtagttttagttattygggaggttgaggtaggagaatggtatgaattygggaggyggagtttgtagtgagtygagatygygttattgtatttyggtttgggygatagagygagatttygttaaaaaaaaaaaaaaaaagtagttttgtaagattaggtgtttggtagataggtatatttagtaaagttataat

SEQ ID NO: 14701 - DNA, 210 bp, synthetic construct
  misc_feature 1..210: note = Description of Artificial Sequence: Synthetic polynucleotide
  source 1..210: mol_type = other DNA
ttattaaaaatataaaaaaattagtttggygyggtggygggygtttttagttttagttgttygggaggttgaggtaggagaatggygtgaattygggaggyggagtttgyggtgagtygagattttgttatagtattttagttygggygatagagtgagatttygttttagaaaaaaaaaaaaaaaaaaaaaagaagtgggaatttagaa

SEQ ID NO: 14702 - DNA, 201 bp, synthetic construct
  misc_feature 1..201: note = Description of Artificial Sequence: Synthetic polynucleotide
  source 1..201: mol_type = other DNA
tttygggtttaygttattttttygttttagtttttygagtagttgggattataggtattyggttaattttttgtattttttatagagayggggtttttatygtgttagttaggatggttttgattttttgatttygtgattygtttgtttgggttttttaaagtgttgggattataggygtgagttatygygtttagtttg

SEQ ID NO: 14703 - DNA, 201 bp, synthetic construct
  misc_feature 1..201: note = Description of Artificial Sequence: Synthetic polynucleotide
  source 1..201: mol_type = other DNA
gatygttttttygttattgtatttatataatttgttttaaatgggtaatttattaagtatattttgtttttgttttygtygtaggtttttgtyggatygtygtttataagtttttatagttygtgagtttttttagtttggttyggtttattttgtggygtttaygtttatttygggtttttttygatttttttttaattt

SEQ ID NO: 14704 - DNA, 201 bp, synthetic construct
  misc_feature 1..201: note = Description of Artificial Sequence: Synthetic polynucleotide
  source 1..201: mol_type = other DNA
gtagtgtagtggygtaatttyggtttattgtaagtttygtttttygggtttaygttatttttttgttttagttttygggttagttgggattataggygttygttattgtgttaggttaattttttgtatttttagtagagatggggttttattatattagttaggatggtttygattttttgatttygtgatttattygtt

SEQ ID NO: 14705 - DNA, 201 bp, synthetic construct
  misc_feature 1..201: note = Description of Artificial Sequence: Synthetic polynucleotide
  source 1..201: mol_type = other DNA
ttygtgtttttttttttygagtyggygggttatagaygtyggaagaaattttygtatttgtagttggaattgtagtttayggygtttyggttttttttttygttttgtttttttttggttaaataatatattaaagaggygaggtaatgattgttggttagtttttatyggggaaaaatttattgttaggatggtatgaat

SEQ ID NO: 14706 - DNA, 201 bp, synthetic construct
  misc_feature 1..201: note = Description of Artificial Sequence: Synthetic polynucleotide
  source 1..201: mol_type = other DNA
ggaataaatatttttgttttataaagatttagaatttattggatattgataaaatgtttattagaggtyggygtagtggtttatgtttataatttyggygyggtggtttatatttgtaatttygaygtggtggtttatatatgtaattttagtatttygtaaggttaggtggggggattatttgagtttaggagtttatga

SEQ ID NO: 14707 - DNA, 201 bp, synthetic construct
  misc_feature 1..201: note = Description of Artificial Sequence: Synthetic polynucleotide
  source 1..201: mol_type = other DNA
gtggtgtaattttggtttattgtaagttttgtttttygggtttatgttatttttttgttttaggttttygagtagttgggattataggtgtatattattaygttyggttaatttttttgtatttttagtaaagayggggttttattatgttagttaggatggtttygattttttgattttgtgatttattagttttagttt

SEQ ID NO: 14708 - DNA, 201 bp, synthetic construct
  misc_feature 1..201: note = Description of Artificial Sequence: Synthetic polynucleotide
  source 1..201: mol_type = other DNA
gtaaattttttgtaaaattttggttttttagattttagttgggtttttttttttaggtttttagtggtagttgtgttttttgtgtgtttaygtyggttagygtaagttatatatggatttagtgtttattgtatttttgttagttttagggttttagttygttgtttygggagattttagttttggtttaggtattttttt

SEQ ID NO: 14709 - DNA, 201 bp, synthetic construct
  misc_feature 1..201: note = Description of Artificial Sequence: Synthetic polynucleotide
  source 1..201: mol_type = other DNA
ttttaatttttttattaagatggagttttgttttatygtttaggttggagtgtagtggygygattayggtttattataattttygtttttygggtttaagygatttttttgttttagtttttygagtagttgggattataggtatgtgttattatgtttaggtaattttagtatttttagttgagayggggttttattatg

SEQ ID NO: 14710 - DNA, 201 bp, synthetic construct
  misc_feature 1..201: note = Description of Artificial Sequence: Synthetic polynucleotide
  source 1..201: mol_type = other DNA
ttttgttaggygyggtggtttatgtttgtaattttagtattttggaaygtygaggtaggygaattaygaggttaagagatygagattatttttgttaatayggtgaaatttygtttttattaaaaatataaaaaattagtygggygtgggggygggygtttgtagttttagttgttygggaggttgaggtaggagaatygt

SEQ ID NO: 14711 - DNA, 201 bp, synthetic construct
  misc_feature 1..201: note = Description of Artificial Sequence: Synthetic polynucleotide
  source 1..201: mol_type = other DNA
attattttttttttttttgagayggagttttgttttgtygtttaygttggggtgtagtggtaygatttyggtttattgtaagtttygtttttygggtttaygttatttttttgttttaatttttygagtagttgggattataggtatatgttattatattyggttaatttttttgaatttttagtagagaggggttttatt

SEQ ID NO: 14712 - DNA, 201 bp, synthetic construct
  misc_feature 1..201: note = Description of Artificial Sequence: Synthetic polynucleotide
  source 1..201: mol_type = other DNA
ttygygaattygggtggtgttttttttttgtattatttagaygtgtttttaggaaggaygtgttgttatgattygttatggtggtttyggggatggttagyggygggatgatgggtgtgatgtggtttyggggatggttagyggtaggatgatgggtgtgaygtatttgtgttatttgggatttaaatttatttatgattt

SEQ ID NO: 14713 - DNA, 201 bp, synthetic construct
  misc_feature 1..201: note = Description of Artificial Sequence: Synthetic polynucleotide
  source 1..201: mol_type = other DNA
attgggttttatygtgttagttaggatggtttygattttttgattttgtgattagttygtttyggttttttaaagtgttggtattataggygtgagttatygttttyggtaaagttttttttygatggttttagtttgttggataagttaggaataaggttattggttgtaagggaggaggagtttttgtaggtggtagyg

SEQ ID NO: 14714 - DNA, 201 bp, synthetic construct
  misc_feature 1..201: note = Description of Artificial Sequence: Synthetic polynucleotide
  source 1..201: mol_type = other DNA
ggtgatttaaatygtttatgtggaatatatatatatatatatatatatatatatatgtgttttagggayggatatatataaataygtgttttaggggtttygtgtgaggagaggagatttatattattgatttagtaattagggtygattttagagggttggagtatatatttygggttgaygataggygtttggttttgg

SEQ ID NO: 14715 - DNA, 201 bp, synthetic construct
  misc_feature 1..201: note = Description of Artificial Sequence: Synthetic polynucleotide
  source 1..201: mol_type = other DNA
tttyggttygtttttttttattttaggttgttttaatttttttttgaaagtttggygtttattttttattttttgggaaatattttgtygttttggggtgygtttygtgaaggagataygttgggtgaaagttagggattttataattatttttygtttttatttygggtttagtgtaggggttgtygtgaaggtattggt

SEQ ID NO: 14716 - DNA, 201 bp, synthetic construct
  misc_feature 1..201: note = Description of Artificial Sequence: Synthetic polynucleotide
  source 1..201: mol_type = other DNA
aggttgttgggaaggaattggtttttatggaagtgttttagtttttttgttttttyggtttttttttttyggttgttttagtgttttattgaaagtttggygttatatttttatttttygggaaattttatgtttttttggggtgtttttygtggggaagataygtattttgggtgaaagttagggattttatgaatattt

SEQ ID NO: 14717 - DNA, 201 bp, synthetic construct
  misc_feature 1..201: note = Description of Artificial Sequence: Synthetic polynucleotide
  source 1..201: mol_type = other DNA
attaatttaaatatttattaatgatagattggataaagaaaatgtggtggggtggagttaagatggtygaataggaatagtttyggtttatagtttttagygtgagygaygtagaagatgggtgatttttgtatttttaattgaggtaaygggtttattttattggggagtgttggatagttggtgtaggatagtgggtgt

SEQ ID NO: 14718 - DNA, 201 bp, synthetic construct
  misc_feature 1..201: note = Description of Artificial Sequence: Synthetic polynucleotide
  source 1..201: mol_type = other DNA
gttygttattatattyggttaattttttgtatttttaatagagayggggttttatygtgttagtaaggatggtttygattttttggtttygtgattygttygygtyggtttttygaagtgttgggattataggtatgagttatygygttyggttagaagtgtttttatttgtttgggaagttgtttttttttggtatttgt

SEQ ID NO: 14719 - DNA, 201 bp, synthetic construct
  misc_feature 1..201: note = Description of Artificial Sequence: Synthetic polynucleotide
  source 1..201: mol_type = other DNA
ttttttattttaaggaataagtttttaattagattagatatagttataagtaaatataaattatgtttttatgtaattttaagagttattttaggtygggygyggtggtttatgtttgtaattatagtattttyggaggtygtggygggyggattaygaggttaggagattgagattattttggttaatatggtgaaatta

SEQ ID NO: 14720 - DNA, 201 bp, synthetic construct
  misc_feature 1..201: note = Description of Artificial Sequence: Synthetic polynucleotide
  source 1..201: mol_type = other DNA
ggttaattaggggtaygtttttttatgtatatggygggtatttttattttagttggtyggtagtggtatygtatatggtattttatatttgtatttttttygttttggtttagtgtggttagggatgggttttgttagtttgtagygttattygttttgtgtaaggtttagaattgtttatttaygtaagtygggagttyg

SEQ ID NO: 14721 - DNA, 366 bp, synthetic construct
  misc_feature 1..366: note = Description of Artificial Sequence: Synthetic polynucleotide
  source 1..366: mol_type = other DNA
tgagygaygtagaagaygggtgatttttgtatttttatttgaggtatygggtttattttattagggagtgttaggtagtgggygtaggttagtgggtgygygtatygtgggygagtygaagtagggygaggtattgttttatttgggaagygttaggggttagggagtttttttttygagttaaggaaaggggtgatygaygtatttagaaaatygggttatttttattygaatattgygttttttagatyggtttaaaaaatggygtattaygagattatattttatatttggtttggagggttttaygtttayggaattttattgattgttagtatagtagtttgagattaaattgtaaggygg

SEQ ID NO: 14722 - DNA, 201 bp, synthetic construct
  misc_feature 1..201: note = Description of Artificial Sequence: Synthetic polynucleotide
  source 1..201: mol_type = other DNA
ataaaggttttttaagtttatattagatttaygagtttagttggttttatttagtggatttygtatygggggtygtaggtggagttgtttgttagtttygygtagtgtttttatagtttttagtttttgggyggtygatgggatygggygtygtggagtagggggtagygtttattggggaggttyggttttgtaggagtt

SEQ ID NO: 14723 - DNA, 201 bp, synthetic construct
  misc_feature 1..201: note = Description of Artificial Sequence: Synthetic polynucleotide
  source 1..201: mol_type = other DNA
ggtgtygtttgttatttttttttttgattaggaaagggaattttttgattttttgtgttttyggagtgaggtaatgtttygttttgtttyggttygygtgyggtgygttgtatttattgttttgygtttattgtttggtattttttagtgagatgaattyggtattttatatggaaatgtagaaattatttattttttgyg

SEQ ID NO: 14724 - DNA, 201 bp, synthetic construct
  misc_feature 1..201: note = Description of Artificial Sequence: Synthetic polynucleotide
  source 1..201: mol_type = other DNA
gtygttttgtagtttgattttagattgttgtgttagtaattagygagatttygtgggtataggatttttygagttaggtgygggatataatttttaggtgygtygttttttaagtttgttggaaaagtgtagtatttyggttggagtgattygattttttaggtgttgtttgttatttttttttttgattgggaaagggaa

SEQ ID NO: 14725 - DNA, 384 bp, synthetic construct
  misc_feature 1..384: note = Description of Artificial Sequence: Synthetic polynucleotide
  source 1..384: mol_type = other DNA
ttgaattgttttaattttaagyggtttagttttaagttttgygagagtattatyggttagggtttgtagatygtggtygttaattgttttgatttttagaygttgaatgtttaggattgygaggttttygtggaggttttgygttttgttaaaygttattgtaagygttgygttatygagtatattaattyggtttttttttgaagggatagagtttattyggygttgtatttatataaatttgaataaagtaaatttttttaaaagtagygtatgtaagtatygatatttatttaaaatagttttttttttygggaaggttattaggaatttggtttttatttttttttattttttatgggtaatagaggttaaagaaaygaa

SEQ ID NO: 14726 - DNA, 216 bp, synthetic construct
  misc_feature 1..216: note = Description of Artificial Sequence: Synthetic polynucleotide
  source 1..216: mol_type = other DNA
gaagaygggtgatttttgtatttttatttgaggtatygggttaattttattagggagtgttagatagtgggygtaggttagtgggtgygygtatygtgygygagtygaagtagggygaggtattgttttatttgggaagygtaaggggttagggagtttttttttygagttaaagaaaggggtgatggaygtagttggaaaatygggttattttta

SEQ ID NO: 14727 - DNA, 334 bp, synthetic construct
  misc_feature 1..334: note = Description of Artificial Sequence: Synthetic polynucleotide
  source 1..334: mol_type = other DNA
tgatatagaagayggtgatttttgtatttttatttgaggtatygggtttattttattagggagtgttagatagtgggtataggttagtgggtgygygtatygtgygygagtygaagtagggtaaggtaatgttttattygggaagygttaggggttagggagtttttttttttagttaaagaaaggggtgayggaygtatttggaaaatygggttatttttattygaatattgygtttttyggatyggtttaaaaaayggygtattaygagattatatttygtatttggttyggagggttttattygayggagtttygttgattgttagtatag

SEQ ID NO: 14728 - DNA, 201 bp, synthetic construct
  misc_feature 1..201: note = Description of Artificial Sequence: Synthetic polynucleotide
  source 1..201: mol_type = other DNA
gggattttaaggttttgttggtgyggtttaaaggtatyggaygttggggttaagatgattttygygttgttatgaattaggttattggaygygggtttygygtygagtttgtagttttygaggagtttttygggttttttygttttgattatattttttyggatggttgtygggtttttgtttgtttygttttgtatygag

SEQ ID NO: 14729 - DNA, 270 bp, synthetic construct
  misc_feature 1..270: note = Description of Artificial Sequence: Synthetic polynucleotide
  source 1..270: mol_type = other DNA
gttattgtattttagtatgggtgatagagttagtttgaaattttgttttgygtttttttgagaagtgatagtgtatyggtatggtagtttttatagttttygttygtttttggygttttttyggttttggtatttattttggtygygtttgaggagttttttagttygtygttgtattgtggaagtttatttttgggttggttaaggtyggagtyggtttttttagtttgyggggaggtgtggagggagaggtaygggygggaatygggg

SEQ ID NO: 14730 - DNA, 253 bp, synthetic construct
  misc_feature 1..253: note = Description of Artificial Sequence: Synthetic polynucleotide
  source 1..253: mol_type = other DNA
ygtgagygaygtggaagataggtgatttttgtatttttatttgaggtatygggtttattttattagggagtgttagatagtgggygtaggttagtgggtgygygtatygtgygygagtygaagtagggygaggtattgttttatttgggaagygtaaggggttagggagtttygttttygagttaaagaaaggggtgayggaygtatttggaaaatygggttatttttatyggaatattgygttttttygatc

SEQ ID NO: 14731 - DNA, 204 bp, synthetic construct
  misc_feature 1..204: note = Description of Artificial Sequence: Synthetic polynucleotide
  source 1..204: mol_type = other DNA
ttttagtaggggyggtygggtagaggygttttttatttttyggayggggyggttggtygggtaggggggttgattttttttatttttttttyggayggggyggyggtaaagattgagatagtttygttgttygttgaattttattttttyggttaaaattaagttttttaataaagattttgaagtgttgagtttattaattta

SEQ ID NO: 14732 - DNA, 228 bp, synthetic construct
  misc_feature 1..228: note = Description of Artificial Sequence: Synthetic polynucleotide
  source 1..228: mol_type = other DNA
gttattttgtagtttgattttagattgttgtgttagtaatyggygagatttygtgggygtaggatttttygagttaggtgygggatatagttttttgatgygtyggtttttaagttygtaggaaaagygtagtattygggtgggagaggtttgattttttaygtgttgtttgttatttttttttttgattaggaaagggaattttttgattttttgtgtttttygagt

SEQ ID NO: 14733 - DNA, 217 bp, synthetic construct
  misc_feature 1..217: note = Description of Artificial Sequence: Synthetic polynucleotide
  source 1..217: mol_type = other DNA
ygtaggatgtagattgtagaygtttatygtttygtaggtagttttagttygagtggtggtygtgttgggtttgtgttyggggttttttttygtatgttttygttttttagtgtttgygatgaygtgygatttattaattattyggatttagygtatttttatgttaaatagygygtgtttatttgtaaagtataygatagtttttgyggttattggg

SEQ ID NO: 14734 - DNA, 201 bp, synthetic construct
  misc_feature 1..201: note = Description of Artificial Sequence: Synthetic polynucleotide
  source 1..201: mol_type = other DNA
ttatttttgaagttattgagattataagtttattggaaggaattaatttyggatatattttgggtgttygtttgggatattgttatayggtgagtattatyggattygtttgggatattgttatayggtgagtattttyggatttgttttattttttattttgttttatttttttttagaatttaggggttaaatatygga

SEQ ID NO: 14735 - DNA, 204 bp, synthetic construct
  misc_feature 1..204: note = Description of Artificial Sequence: Synthetic polynucleotide
  source 1..204: mol_type = other DNA
aagataataaattggttttaaataaaaagtaagaaaaatgttggggaggagttaagatggttaaataggaatagtttyggtttatagtttttagygtgagygaygyggaaaatgggtgatttttgtatttttatyggaggtatygggtttattttattagggagtgttagatagtgggtataggttagtgggtgtgygtatygt

SEQ ID NO: 14736 - DNA, 223 bp, synthetic construct
  misc_feature 1..223: note = Description of Artificial Sequence: Synthetic polynucleotide
  source 1..223: mol_type = other DNA
tagtgggtatatagaggtagtygggattygtttggaagagttttygttyggggtaaggagtygggattgtgtttaggaggtagtggggagtttyggagagygaagygttttttgygtagattygygtgtttggagtatyggagtttgtagggtaagagagggtttttagaagatttaygaygttttattgggatgtagagggaaayggttatttgtattttta

SEQ ID NO: 14737 - DNA, 201 bp, synthetic construct
  misc_feature 1..201: note = Description of Artificial Sequence: Synthetic polynucleotide
  source 1..201: mol_type = other DNA
tttaaagtattaggattataagtagaattatygygttttttgtttttttttttgtttttgtttttgttttgttgttgttgttgatgttgttatagagtttygtttttgtygtttaggttgggatgtaatggtgtgatttyggtttattgtagttttygtttttyggttttaagtaatttttttgttttagttttgtgagta

SEQ ID NO: 14738 - DNA, 203 bp, synthetic construct
  misc_feature 1..203: note = Description of Artificial Sequence: Synthetic polynucleotide
  source 1..203: mol_type = other DNA
agtataaataaattggtygggyggtagttttagttattygggaggttgaggtagtagaatagygtgaattygggaggyggagtttgtagtgagtygagatygygttattgtattttagtttgggtgatagagtgagattaygttttaaataaaaaaaaaaaaaaaaaaaaaaagtatttttttagatttagtttgatattagg

SEQ ID NO: 14739 - DNA, 201 bp, synthetic construct
  misc_feature 1..201: note = Description of Artificial Sequence: Synthetic polynucleotide
  source 1..201: mol_type = other DNA
ttaygttyggttaatttttttgtattattagtagagaygaggttttatygaggttttatygtgttagtygggatggtttgggttttttgatttygtgattygtttaattyggttttttaaattgttgggattataggtatgagatatygygttyggttgttgtttgattttttttagtagtgttttgtagttttttttgta

SEQ ID NO: 14740 - DNA, 201 bp, synthetic construct
  misc_feature 1..201: note = Description of Artificial Sequence: Synthetic polynucleotide
  source 1..201: mol_type = other DNA
ttttygagtagttgggattataggtgtttgttatttygttyggttaattttttgtatttttagtagagatggggttttatygtgttagttaggatggtttygattttttgatttygtgattygttagtttyggttttttaaagtgttgggattataggygtgagttatygygttyggtttaatttaatttttaataatggt

SEQ ID NO: 14741 - DNA, 201 bp, synthetic construct
  misc_feature 1..201: note = Description of Artificial Sequence: Synthetic polynucleotide
  source 1..201: mol_type = other DNA
aaaagttatagggggygtgaggatagayggygtgtttttttttatatatatggagaygtaggtyggagtaayggtatayggattaygtataygyggyggaygtattaaygtttaygtagaagagaataaaagtygtttttaattgggtataaattttttgtatttaaatatttygatatttataaataaaattagaataga

SEQ ID NO: 14742 - DNA, 201 bp, synthetic construct
  misc_feature 1..201: note = Description of Artificial Sequence: Synthetic polynucleotide
  source 1..201: mol_type = other DNA
tgatttgtttttttyggttttttaaagtgttgggattataggygtgagttatygygttyggtttaggttattttttttttttttttttttttttttgaggyggagtttygttttgtygtttaggttggagtgtagtggygygatttyggtttattgtaagtttygtttttygggtttatatgatttttttgttttagtttt

SEQ ID NO: 14743 - DNA, 201 bp, synthetic construct
  misc_feature 1..201: note = Description of Artificial Sequence: Synthetic polynucleotide
  source 1..201: mol_type = other DNA
ggattataggygtgagttatygygttyggtttaaattatggattttttttttttagtggagtttygtttttgtttaggttggaataggatggtaygaattyggtttattgtaatttttatttttygggtttaagygatttttttgttttagtttttygagtagttgggattataggtatgtgttattatgtttggttagta

SEQ ID NO: 14744 - DNA, 201 bp, synthetic construct
  misc_feature 1..201: note = Description of Artificial Sequence: Synthetic polynucleotide
  source 1..201: mol_type = other DNA
aattttttttttatttttttygtttttttattttataaaatygttattgttattatggtttatttttaatgagttgttgggtatattttttagayggggtygtggtygggtagaggggttttttattttttagtaggggyggtygggtagaagygttttttatttttyggatggggyggttggtygggyggggggttgatt

SEQ ID NO: 14745 - DNA, 201 bp, synthetic construct
  misc_feature 1..201: note = Description of Artificial Sequence: Synthetic polynucleotide
  source 1..201: mol_type = other DNA
gggggttttttaagtttagttttgggttygggtyggggtatagggtagagygggtttttttagtttttgttatgaggttaaggtagtgtatygttygtagygtatatttagaaattaaagtttaggagttggttattatttyggtttatagttgatggaagagtaggtgttttygagaatttatagtgttttttggttagt

SEQ ID NO: 14746 - DNA, 201 bp, synthetic construct
  misc_feature 1..201: note = Description of Artificial Sequence: Synthetic polynucleotide
  source 1..201: mol_type = other DNA
tgggtagtagagtgagattttgttttaaaaaaaaaaaaaaaaagggggggtygggtgyggtggtttaygtttgtaattttagtattttgggagatygaggygggtagattaygaggttaggagatygggattattttagttaaaayggtgaaatttygtttttattaaaaatataaaaaattagtygggygtagtggyggg

SEQ ID NO: 14747 - DNA, 201 bp, synthetic construct
  misc_feature 1..201: note = Description of Artificial Sequence: Synthetic polynucleotide
  source 1..201: mol_type = other DNA
gtgggagttatagggttttaggggaggagygttttaggtygyggtaatagtaggtgtaaaggttttgaggtaggayggggtagggaggtttagagtttatygygtagagattygggaggtyggtaggtayggtgaggattttgatttaaatttaggaaaggggaattatattggggtatgattttttgtatttttygagat

SEQ ID NO: 14748 - DNA, 201 bp, synthetic construct
  misc_feature 1..201: note = Description of Artificial Sequence: Synthetic polynucleotide
  source 1..201: mol_type = other DNA
gggatttttttatgttggttaggttggtttygaatttttgattttaagtgatttatttgtttyggttttttaaagtgatgggattataggtatgagttatygygttyggttaagggtttttttagatgtaattaagttaagatgaggttatattgagttaggtgggttttaaatttaatggttagtgtttttataagtata

SEQ ID NO: 14749 - DNA, 211 bp, synthetic construct
  misc_feature 1..211: note = Description of Artificial Sequence: Synthetic polynucleotide
  source 1..211: mol_type = other DNA
gttttagggtyggaggagtaggagatttgggtagyggggtgggygagtgtygggaggaggtaagaggtygygggggaggaagaygtttttttyggttttgyggggtaggtygygtagggtaggtygtgyggggtaggtggggggtgttaaggaagttygggygtggttatatygtagagaaagttatgggaggtaygttttgagagttggg

SEQ ID NO: 14750 - DNA, 201 bp, synthetic construct
  misc_feature 1..201: note = Description of Artificial Sequence: Synthetic polynucleotide
  source 1..201: mol_type = other DNA
gtagttaaagttatttttttggttgaaagatatttttttyggggggaggagttaagatggtygagtaggaatagtttyggtttatagtttttagygtgagygataaagaagaygggtgatttttgtatttgtatttgaggtattyggtttattttattagggagtgttagatagtgggygtaggttagtgggtgygygtat

SEQ ID NO: 14751 - DNA, 201 bp, synthetic construct
  misc_feature 1..201: note = Description of Artificial Sequence: Synthetic polynucleotide
  source 1..201: mol_type = other DNA
gtttaggatttgtagtttattatgtttgagttttttatttattttatgggtttttgtgtygtttaagtttttyggaygagtgttattttttgttttayggygtttagttttatygattatttaagggttgaggaatgtgagtatayggygtaggattggtaggtagttttatttgtagtttyggtgtgggatttattaggt

SEQ ID NO: 14752 - DNA, 201 bp, synthetic construct
  misc_feature 1..201: note = Description of Artificial Sequence: Synthetic polynucleotide
  source 1..201: mol_type = other DNA
tggtaatattgtgaagaygtaggttttttatgggaaagattgttgttyggaagtttttatataataggtttttattgagattttaaggttgatagtayggygggagtttttgggatttttgggttyggtatagygttatygtagtaggtaggtatygggtggttagaagtygattatttttttaaatggtttgtatatatt

SEQ ID NO: 14753 - DNA, 201 bp, synthetic construct
  misc_feature 1..201: note = Description of Artificial Sequence: Synthetic polynucleotide
  source 1..201: mol_type = other DNA
tttttatgggttgatttggtgattttttatggagaatgygtaggagtyggatattggtattgttaggtggaaaagttttttgttagggtgaaaagttagayggygtttgtttttygtttttggagtgtttttggtttaaygtagtagtttygtagataaaygttatagaaggtagagygttttatagatatgaaggagtgg

SEQ ID NO: 14754 - DNA, 201 bp, synthetic construct
  misc_feature 1..201: note = Description of Artificial Sequence: Synthetic polynucleotide
  source 1..201: mol_type = other DNA
gatttttggattygttgggttgttttygtattyggttttttttttttaagtttgyggtygggtgtggtttttttaattttagygtygattttygtgtttgygygttttttttttattttttttattygyggggttaggggttatayggtatygtygtttgggttttygagtagggagagtygagtgttgattttgttagaa

SEQ ID NO: 14755 - DNA, 201 bp, synthetic construct
  misc_feature 1..201: note = Description of Artificial Sequence: Synthetic polynucleotide
  source 1..201: mol_type = other DNA
ggatattttataaaatttttgaygagttttttttaaaattattaggttggtygggtgyggtggtttatgtttgtaattttagtattttgggaggtygaggygggtagattataaggttaggagatygagattattttggttaatayggtgaaatttygtttttattaaataatataaaaaattagttgggygtggtagygg

SEQ ID NO: 14756 - DNA, 201 bp, synthetic construct
  misc_feature 1..201: note = Description of Artificial Sequence: Synthetic polynucleotide
  source 1..201: mol_type = other DNA
tttttttttatttttttaggggtttgattttttttttaatygtatttttatagaatggtyggttagataggaagtttyggttggygaagtttagttttygygggtataggttggygaattttagagattygggattygggtaggtttygtattygattttttatayggtttygatggagtagtagtagaygtttattyggt

SEQ ID NO: 14757 - DNA, 201 bp, synthetic construct
  misc_feature 1..201: note = Description of Artificial Sequence: Synthetic polynucleotide
  source 1..201: mol_type = other DNA
aaattagttaggtttggtggtaggtatttgtaattttagttattttaggggttgaggtaggagaattgtttgaattygggaggtggaggttgtagtgagtygagattgygtttttgtattttagtttgggggataagagtgagatttygttttaaaaaaaaaaaaaaaaaaaaaaaaaggtygggtggtttatatttgtaa

SEQ ID NO: 14758 - DNA, 201 bp, synthetic construct
  misc_feature 1..201: note = Description of Artificial Sequence: Synthetic polynucleotide
  source 1..201: mol_type = other DNA
tatygttatgatttgygagygygtgttttttatttygttagagttggtagtgtgygttatttattyggtgttyggttattatygttttaygtggayggygyggttggtttttaygtaygygttttyggtggtygaggtygaygtggaygtgttgttgtttatttttatgtttttgygtttttatttgttgggtygggtgat

SEQ ID NO: 14759 - DNA, 201 bp, synthetic construct
  misc_feature 1..201: note = Description of Artificial Sequence: Synthetic polynucleotide
  source 1..201: mol_type = other DNA
ttygyggggttygttygtttttttagtygttgtttttygggyggygttygtyggygtygatttttataatttattttttttagatagagtttttttttgtygtttaggttggagggaagtggtatgattttagtttattgaaatttatttttttygggtttaagygatttttatttttgtttttggagtagttgggattat

SEQ ID NO: 14760 - DNA, 201 bp, synthetic construct
  misc_feature 1..201: note = Description of Artificial Sequence: Synthetic polynucleotide
  source 1..201: mol_type = other DNA
ttattttagttttttgagtagttgggattataggtttgtgttattatgtttagtttattttttattttattttatttttatttttattttttttttgagayggagtttygttttgtygtttaggttggagtgtagtggygggatttyggtttattgtaagtttygtttttygggtttaygttatttttttgttttagtttt

SEQ ID NO: 14761 - DNA, 201 bp, synthetic construct
  misc_feature 1..201: note = Description of Artificial Sequence: Synthetic polynucleotide
  source 1..201: mol_type = other DNA
aaatggtgatttagaggtygtttttattygaygggtttttttagtygaagaygtttagttaatgaattttaagtagatttatggtygggtgtgaagttaayggagtttttatttygtggagaygagtagtataaatttttgtttttaatgtttaatgatatgtaaaatatttaaatttgtaaygtagaattattaagttgt

SEQ ID NO: 14762 - DNA, 201 bp, synthetic construct
  misc_feature 1..201: note = Description of Artificial Sequence: Synthetic polynucleotide
  source 1..201: mol_type = other DNA
ggtaggyggattattttagtttaggagttygagattagtttgggtaatatggtaaaattttatttttataaaaaatataaaaattagtyggttatggtgtygtgtatttgtagttttagttattagggagattgaggtgggagggttatttaagtttgggagaggygggtgtggtggaggttgtagtgagttaagatgtat

SEQ ID NO: 14763 - DNA, 201 bp, synthetic construct
  misc_feature 1..201: note = Description of Artificial Sequence: Synthetic polynucleotide
  source 1..201: mol_type = other DNA
tagattgatagattttttttttttttgagatggagttttgtattgttattygggttggagtgtagtggtgtaatttyggtttatygtaatttttttaattygygtttaagtaatttttttgttttagtttttygagtagttgggattatagggygtgttattaygtttggttaattttttgtatttttagtagagatgggg

SEQ ID NO: 14764 - DNA, 201 bp, synthetic construct
  misc_feature 1..201: note = Description of Artificial Sequence: Synthetic polynucleotide
  source 1..201: mol_type = other DNA
tttygggyggtaaggattttayggtgttggtataygtgttgygtaygttggtatygggtttgggtattttattgtagtttatggttgtagataagggtatygggygtggtttagygggaggattttagtaaggagttggggaaataygtatgtgtttatttagggtyggagtttattgaaggtttatgtgggtagtaygtg

SEQ ID NO: 14765 - DNA, 201 bp, synthetic construct
  misc_feature 1..201: note = Description of Artificial Sequence: Synthetic polynucleotide
  source 1..201: mol_type = other DNA
yggtttattgtaatttttatttttygggtttaagygatttttttgttttagttttttgagtagttaggattataggtatgtattattattttyggttaatygttgaatttttagtagagayggggttttattaygttygtaaggttggtttygaatttttgattttaggtgatgtttttaygtyggttttttaaagtgtta

SEQ ID NO: 14766 - DNA, 201 bp, synthetic construct
  misc_feature 1..201: note = Description of Artificial Sequence: Synthetic polynucleotide
  source 1..201: mol_type = other DNA
yggttttttaaagtgttgagattataggygtgagttatygygttyggtttattttaggtgatttattttttttagttttttaaagtgttgagattataggygtgagttattaygtygggtttattttaggtgatttatttttttyggttttttaaagtgttgagattataggygtgagttatygygttyggtttattttag

SEQ ID NO: 14767 - DNA, 201 bp, synthetic construct
  misc_feature 1..201: note = Description of Artificial Sequence: Synthetic polynucleotide
  source 1..201: mol_type = other DNA
gatttgagaatygtttgtattagtttggttttttgtatagtgtttgygtyggtgtatattttagaggggagttgygttattagatgaattaggattttggyggaggaagggggtgtyggtagggtttttatggtatttgttgtttgtggttgaggggagtttggaagggtattagttttatttatttttggtygagatttt

SEQ ID NO: 14768 - DNA, 201 bp, synthetic construct
  misc_feature 1..201: note = Description of Artificial Sequence: Synthetic polynucleotide
  source 1..201: mol_type = other DNA
ttyggtatatttagagtatattggggttggggtagatggtggtatttgttttggttggaggagttgggagggttggggaagggaygtgtgatttttttttygataaatttggaygagatgttaagtataatatagaggttggyggyggggtttttttttgttttyggtggattaatttattgtgggattttgggtaatttt

SEQ ID NO: 14769 - DNA, 201 bp, synthetic construct
  misc_feature 1..201: note = Description of Artificial Sequence: Synthetic polynucleotide
  source 1..201: mol_type = other DNA
ttaaaaaatatatayggtygggygyggtggtttaygtttgtaattttagtattttgggaggtygaggtgggyggattaygaggttaggagatygagattayggtgaaatttygtttttattaaaaaaatataaaaaattagtygggygtagtggygggygtttgtagttttagttgttygggaggttgaggtaggagaatg

SEQ ID NO: 14770 - DNA, 201 bp, synthetic construct
  misc_feature 1..201: note = Description of Artificial Sequence: Synthetic polynucleotide
  source 1..201: mol_type = other DNA
ayggttatatggtagggtttttgttgtttttatygtygttagtttagtygttygttattttttttagtggtgtttttgttattaatgggttttttataatygattyggtttaygggttgtagatgttgyggattattggygtggggaagtatgagtttatygattyggggtattttagaggtaagttttgttgttaygtgt

SEQ ID NO: 14771 - DNA, 279 bp, synthetic construct
  misc_feature 1..279: note = Description of Artificial Sequence: Synthetic polynucleotide
  source 1..279: mol_type = other DNA
gggtttgggttygttaggtgtagaataaggagaaaggggtagaggggaagagtygggtygaattttagygagggattyggttttttttggaggagaggatygtattygygttaggagtatggatttatttagggagtgtttgggyggagaagtagtttttgttttaggtttttygttgyggtatttaaagaggtygggyggtttagaggttygtaagttaygtttttttttaggtttygttttygtttggttattttttttgttgttagtttttttatt

SEQ ID NO: 14772 - DNA, 201 bp, synthetic construct
  misc_feature 1..201: note = Description of Artificial Sequence: Synthetic polynucleotide
  source 1..201: mol_type = other DNA
ttggttgttatgaaattataaattatgtttatagaaattttagtttgagaaagaatttagatttttttttttttttttttttttttttgagattgagtttygttttgtygtttaggttggagtgtagtgatgttatttyggtttattgygagttttgtttttygggtttaygttattttttggttttagtttttygtgtag

SEQ ID NO: 14773 - DNA, 201 bp, synthetic construct
  misc_feature 1..201: note = Description of Artificial Sequence: Synthetic polynucleotide
  source 1..201: mol_type = other DNA
tygggggyggggyggggyggggyggggyggggygggggggtggggttgaggtaggagaatggygtgaattygggaggyggagtttgtagttagtygagatygtgttattgtattttaattygggygatagygattttattttaaaaaataataataataaaaaagaataaagattttataggtattttttttatagtagag

SEQ ID NO: 14774 - DNA, 201 bp, synthetic construct
  misc_feature 1..201: note = Description of Artificial Sequence: Synthetic polynucleotide
  source 1..201: mol_type = other DNA
ggggttttatygtgttagttaggatggtttyggttttttgatgtygtgatttttttatttaggttttttaaagtgttgggattataggygtgagttatygygttyggtttagttttttatttttaataagtttttaggtgatgtttatgttggtagttttttgagattattatattttaagttttagggtgttagaaaaac

SEQ ID NO: 14775 - DNA, 201 bp, synthetic construct
  misc_feature 1..201: note = Description of Artificial Sequence: Synthetic polynucleotide
  source 1..201: mol_type = other DNA
tgttgttgttgtttttaagttggagttttgttttgttatttaggttgtagtgtagtggtaygatttyggtttattataatttyggtttttygggttttagygatttttttgttttagttatttaagtagttgggtttataggygtatgttattaygtttggttaatttttgtatttttaggagagataggtttttattatg

SEQ ID NO: 14776 - DNA, 201 bp, synthetic construct
  misc_feature 1..201: note = Description of Artificial Sequence: Synthetic polynucleotide
  source 1..201: mol_type = other DNA
aatygagttgtggaatggggtttygtggagtaggttgagtgtgtyggtygtggaygggtygtgggygggattttttagtgtgttattattgaggtattttygtttttttaygtgtttttgtttttttttttagaagtttaatattttygagaggatttaaaatatagagtgattagtttttatgtgtattttttggataaa

SEQ ID NO: 14777 - DNA, 201 bp, synthetic construct
  misc_feature 1..201: note = Description of Artificial Sequence: Synthetic polynucleotide
  source 1..201: mol_type = other DNA
aggggagaygaagaaggagggggtagttygtttaggaggttaggggggtattygtgttyggtttaggtttatygaygtagatattattgatatttaygttygygttgtgttttttgyggygtttgyggtygttaatgttatttattgggyggtataygttatgtgagtataggatttaggttattttygtttgttttggyg

SEQ ID NO: 14778 - DNA, 201 bp, synthetic construct
  misc_feature 1..201: note = Description of Artificial Sequence: Synthetic polynucleotide
  source 1..201: mol_type = other DNA
ttatatattttaygygttttgtttattaygaggtttgtattttttgggtagtaggtgtygygygttttygggtattttgtaggtggagtygtyggygtagygtagtatttygtgtttttgaygtyggtttyggatttagtygtygtygtatttgttatygtttttgggggatataygtayggagtttatttttaatagggg

SEQ ID NO: 14779 - DNA, 201 bp, synthetic construct
  misc_feature 1..201: note = Description of Artificial Sequence: Synthetic polynucleotide
  source 1..201: mol_type = other DNA
tttattataaatataaaaaattagtygggygtggtggygggtatttgtagttttagttattyggaaggttgaggtaggaaaatgatgtgaattygggaggyggagtttgtagtgagtygagatygygttgttgtatttaagtttgggygatagagygagatttygggttaaaaaaaataaaagaatatagggtatggtatt

SEQ ID NO: 14780 - DNA, 201 bp, synthetic construct
  misc_feature 1..201: note = Description of Artificial Sequence: Synthetic polynucleotide
  source 1..201: mol_type = other DNA
tagagtagttgggattataggygtttattgttaygttyggtttatttttttttgtatttttagtagagayggggttttatygtgttagttaggatggtttygattttttgaygtgatttattygtttyggttttttaaagtgttgggattataggygtgagttatygtgttyggtttatttatgtgttttttgggaagggg

SEQ ID NO: 14781 - DNA, 201 bp, synthetic construct
  misc_feature 1..201: note = Description of Artificial Sequence: Synthetic polynucleotide
  source 1..201: mol_type = other DNA
aggygttygttattaygttyggttaattttttgtatttttagtagagayggggttttattatgttagttaggatggtttygattttttgattttgtgattygtttatttygtttttttaaagtgttgggattataggygtgagttatygtgttyggttgtttttyggtatattttttatttttagtatgtggtttttatat

SEQ ID NO: 14782 - DNA, 203 bp, synthetic construct
  misc_feature 1..203: note = Description of Artificial Sequence: Synthetic polynucleotide
  source 1..203: mol_type = other DNA
gttggttatggaaggttatagtttygtagatggtgtyggtggagtttggggtagggtattttgagtttgggaaggtttggggtgaaggttyggaggttggygygtaggaggttaaagtagtagggaggtttggggagagttaggtggggttgtgttttttaygttgtaggtygtgtttatagatggtgaaagaygttgtggaa

SEQ ID NO: 14783 - DNA, 201 bp, synthetic construct
  misc_feature 1..201: note = Description of Artificial Sequence: Synthetic polynucleotide
  source 1..201: mol_type = other DNA
ttttaagtagttgggattataggygtttattattaygttyggttaatgtttttgtttttttagtagagayggggttttatygtgttagttaggatggtttygattttttgatttygtgattttttygtttyggttttttaaagtgttgggattatagtaattattygatggygtgagttatygygttyggttatgtatgat

SEQ ID NO: 14784 - DNA, 201 bp, synthetic construct
  misc_feature 1..201: note = Description of Artificial Sequence: Synthetic polynucleotide
  source 1..201: mol_type = other DNA
tttatttttgtgaaaatttttgtgtttgaaaattattgtaaaatatttggaattattattattatttatttttattttttgagayggagtttygttttgtygtttaggttggagtgtagtggygygatttyggtttattgtaagtttygtttttygggtttaygttatttttttgttttagtttttygagtagttgggatt

SEQ ID NO: 14785 - DNA, 201 bp, synthetic construct
  misc_feature 1..201: note = Description of Artificial Sequence: Synthetic polynucleotide
  source 1..201: mol_type = other DNA
ttggygagagataaggtatttagggaaagaagaaaaaagtttaggaagggattttagtttgttagattyggggtagaagtttttttyggaygagtttttayggagaaatttaaatattaggggtttyggaaggtyggaagtttttaagttgtttaggaaaagattaaagagatataaattataaaagttttgggattttta

SEQ ID NO: 14786 - DNA, 201 bp, synthetic construct
  misc_feature 1..201: note = Description of Artificial Sequence: Synthetic polynucleotide
  source 1..201: mol_type = other DNA
gttattgattttgagttttygtttttttatttataaaattgagattagggtygggtatggtggtttatttttgtaattttaatattttgggaggtygaggygggyggattaygaggtgaggagtttgagattagtttgattaatatggtgaaatttygtttttattaaaaatataaaaattagtygggygtggtggygygt

SEQ ID NO: 14787 - DNA, 201 bp, synthetic construct
  misc_feature 1..201: note = Description of Artificial Sequence: Synthetic polynucleotide
  source 1..201: mol_type = other DNA
gtatgtttattgtagaattatttataatagtaaagatatggatagatyggattaagaaaatgtggtgtatatatatatatgttatggaatattatgtagtygtaaaaagaataaaattyggttttttgtagtaatatggatgtagttggaggttattattyggagtgaattaatataggaatagaaaattaaatattgttt

SEQ ID NO: 14788 - DNA, 201 bp, synthetic construct
  misc_feature 1..201: note = Description of Artificial Sequence: Synthetic polynucleotide
  source 1..201: mol_type = other DNA
ttttagtttygtgatyggttttttgttttgtgttgatatttagtatttttttyggtttttgtttygaggggaaaataaaataggggtttttaggttttatygttggtttattttatygtagtaaatygatygagggttttttgttgygtttttgyggtttgttgttttatttagyggttttgatattyggtatttatttaa

SEQ ID NO: 14789 - DNA, 201 bp, synthetic construct
  misc_feature 1..201: note = Description of Artificial Sequence: Synthetic polynucleotide
  source 1..201: mol_type = other DNA
gygggyggattaygaggttagtagattgagattattttggttaatatggtgaaatttagtttttattaaaaatataaaaaattagtygggtgtggtggtaygygattgtagttttatttattggggaggttgaggtaggagaatygtttgaattygggaggyggaagttgtagtgagtygagatygygttattgtattttc

SEQ ID NO: 14790 - DNA, 201 bp, synthetic construct
  misc_feature 1..201: note = Description of Artificial Sequence: Synthetic polynucleotide
  source 1..201: mol_type = other DNA
ttttattttttagttagttttttgtgtagtgtttagggtttyggtagttaggatagagygagtaaaagaagatggatagtggatagggygtagtggtttaygtttgtaattttagygttttgggagagygaggygggtagattataaggttaagagattaagattattttggttaatatggtgaaattttgtttttattaa

SEQ ID NO: 14791 - DNA, 201 bp, synthetic construct
  misc_feature 1..201: note = Description of Artificial Sequence: Synthetic polynucleotide
  source 1..201: mol_type = other DNA
aaggtaggyggattayggggttaggagttygagattagtttggttaatttggtgaaaattygtttttattaaagatataaaaattagttgagtgttgtggygtaygtttgtaattttagttattggggaggttgaggtaagagaattatttgtaatygggaggyggaggatgtagttagygagatggygttattgtatttt

SEQ ID NO: 14792 - DNA, 201 bp, synthetic construct
  misc_feature 1..201: note = Description of Artificial Sequence: Synthetic polynucleotide
  source 1..201: mol_type = other DNA
atttagggggttgaggtaggagaatygtttgaattygggaggyggagtttgtagtgagtygagattgagttattgtatattttagtttgggtaataagagygagatttagttttagaaaaaataaataaataataaaataaaaagtaggtygggtgygatggtttatatttataatattagtattttgggaggtygaggtg

SEQ ID NO: 14793 - DNA, 3238 bp, synthetic construct
  misc_feature 1..3238: note = Description of Artificial Sequence: Synthetic polynucleotide
  source 1..3238: mol_type = other DNA
tagaaygttaggygtgaaaggtgaygttgaggtagtaygagggaaaaagtagtaggtagygatygttatayggaygatagtgttttttyggtagtttttgygttagattyggggttgtygtggagtttttgatttgaatttagggtgygtgtygygtttayggggggatattttaaagyggtaagaatgttttttgggaagggaataggaygttaggtttgaaaggggattttgaagtagtttaggaaaaaattttttayggattayggtgttttttyggtagtttttttgttaggttygagggggttgttgtgttttaggtttgtatttagggttttayggggggtattttaaagyggtaagtaggtttttaggggaaggggatagtaygttaggtttggagggggaygttgaggtagtttygggaataaagaggggatgttggggttttgttayggataatattgttttttygatagtatttgtggtgggtttgggagygttatggagtttttggtttgtatttaaggtgygtgtttygttttyggggggtattataaagyggtaagaaggttatygggggaagggtatgggaygttagggttgaaagggatagttgaggtagttyggggaaaaaygtggtaggttggggtygttttatggaygatagtgtttttttagtagtttttgygttaggttyggggtggtygtggagtttttggtttgtatygagggtgygggtygtatttatgggggtattttaaagtggtaagaaggtygtygggygaaygttatagaaggttaggttttaatggggatgttgaggtagtatagagagaaaagyggttagtygggttttttttayggatgatagtgtttttttggtagtttttgygttgggttyggggggatygtggagtttttattttgtatttagggtgygtgtttygtttatgggaggtattttaaagyggtaagtaggtttttgggggaaggggatagtattttagatttgaagggggattttgaggtagttygtggaaaaaaayggygaygttgagttttttttataaaygatagtgtttttttggtagttttttygttgggttagggtggttttggagttygtggtttgtatttagggtgygtgtttygtttaagggggtattttaaagyggtaagtagattttygggggaagggagagtaygttaggtttgaaggggaggttgaggyggtttyggggtaaaagtggtgaagttggggtttttttayggatgatatygtttttttggtagtttttgtagtgggtttagaggtgtygtggagtttttggtttgtttttaggttgtgtgtttygtttaygagtggtattataaagtagtaagaaggtttttaggggaagggtataggattttagggttgaaaggtagagttgaggtagatyggtgttattttaaggataatagtgttttgttyggtagtttttgtatygggtttggggtggttgtggagtttttggtttgtattyggggtgygtgtygtgtttaygatgggtatygtaatgyggtaagaagttttygagtggaagggaataggaygtygagtttgaaaggggaygttgaggtagttyggggaaaaaatttttattgagaatagtgttttttyggtagtttttgagtgggatttaggtggayggtggagtttttggtttggatttagggtgtttgttttgtttayggggtgtaygtgaaagtggtaatagggttttygggggaaggggataatatgttaggtttgaagagggaygttgggttagttagaggaaaatagyggttaggttgtggtygttttatagattatagtgttttttyggtagtttttgagtttggtttaggygggggggtttggagtttttgttttgtaatagagtgygtgtttygtttaagtgtgtaygygaaagttgtaagaagggtttygggggaagggaataggatgttaggtttgaaaggggattttgaggtagtttagggaaaaattttttayggaggatagtgatttttygatattttttgygtttggttttgggggttttggagtttttggtttatatttagggtgygtgtttygtttaygggtggtattttaaagtagtaagaaagtttyggggggggaagaataggatgttagatttgaaaggggaygttgaggtagtttaggaaaaaaaggggygaggttggggtttttttayggatgatagtgttttttttatagtttttatgttagtttygggagggtygyggagtttttgttttgtatataatgtgygtgtttygtttayggggggtattttaaagtggtaagaagtttttygygggaaggtaataggaygttaggtttgaatggggaygtttaggtagtttggagaaaaaagtagygaggttggggtgattttaygaatgatagtgttttatyggtagtttttttgtygggtatgygggggttgttgattttttggtttgtatttagggtgagtgttttgtttayggygggtattataaagtagtaagaaggttttygggggaaagggatagtaygttagttttgaagggggaagttgaggtagtttyggggaaaaaaagyggggatgttggggtttttttayggaygatattgtttttttagtagtttttgtagtgggttygggagygttttggagtttttgttttgtatttygggtgygtgttttatttayggggagtattataaagyggtaagaaggttattgggggaagggtataggaygttagggttgaaggggatagtggagatagtttaaggaaaaaagtggygggatggtgtygttttaaggatggttatttttgygtygggttagggatggtygyggagtttttggtttgtatttaggttgtgtgtttygtttatagggggtattttaaagtagtaygaaggtttttaggggaagggaagaggaygttaggtttggaaggtgaygttgaggtagtagggggtaaaaagtggygggtygggtttttttayggatgatagtgttttttyggaagtygttgygtagggttyggygtgtttgtggagtttttggtttgtatttagaatygtgyggygtttaygaygggtattttaaagyggtaagatatttttygttggaagggaataggatgttaggtttgaaaggagaagttgagttagttyggggaaaaa

SEQ ID NO: 14794 - DNA, 201 bp, synthetic construct
  misc_feature 1..201: note = Description of Artificial Sequence: Synthetic polynucleotide
  source 1..201: mol_type = other DNA
ttaaggttattattttaaagtgttttagaaaataatatatagaaggtygggygyggtggtttaygtttgtaattttagtattttgggaggtygaggggggyggattaygaggttaggagatygagattattttggttaatayggtgaaatttygtttttattaaaaatatatatatataaaattagtygggygaggtggta

SEQ ID NO: 14795 - DNA, 201 bp, synthetic construct
  misc_feature 1..201: note = Description of Artificial Sequence: Synthetic polynucleotide
  source 1..201: mol_type = other DNA
ttattatttatttattattttgtttgtaatttgggttattatttattagtaatttgatgattaataygttttattttagtaggtgtgtaaggtgygggggyggatataaagattgyggttttyggagaggayggttagggggtygtttttgtaagtgttttttaaaataattggttatygttttygagtgtttgggygtyg

SEQ ID NO: 14796 - DNA, 201 bp, synthetic construct
  misc_feature 1..201: note = Description of Artificial Sequence: Synthetic polynucleotide
  source 1..201: mol_type = other DNA
ayggtgattagaaatgtattaaattttgaatgtataaaagagagagttttaatatgaaatagtaattttttgagaaygaagatttygtagtgtyggtgttygttgggtygtgtaggtttyggtygttttaygttygtgttygtttttatygtgattttttygttttyggtaygtttagggttaattttygggtttattgta

SEQ ID NO: 14797 - DNA, 201 bp, synthetic construct
  misc_feature 1..201: note = Description of Artificial Sequence: Synthetic polynucleotide
  source 1..201: mol_type = other DNA
tttggggattattttgtttttttgttttgattttttttttttttttttttttttttttgagayggagtttygttttgtygtttaggttggagtgtagtggygygatttyggtttattgtaagttttatttttygggtttatattatttttttgttttagtttttygagtagttgggattataagtattygttattaygttc

SEQ ID NO: 14798 - DNA, 201 bp, synthetic construct
  misc_feature 1..201: note = Description of Artificial Sequence: Synthetic polynucleotide
  source 1..201: mol_type = other DNA
ttttygggayggggggatttttaggtattttygggttttgagttgggtygttagggtygttygttttttgtygttttttttgggtygagtttygttttygygttttgtagtggagtagtygtttttaaaggtgtaygtgattagggtgyggtygggatagygggtattttttygggttttagygtygygtgygttttggtc

SEQ ID NO: 14799 - DNA, 201 bp, synthetic construct
  misc_feature 1..201: note = Description of Artificial Sequence: Synthetic polynucleotide
  source 1..201: mol_type = other DNA
yggygttyggtatgaaattttttttttttttttgagatagagtttygtttttgygtttaatttggagtgaagtggtaygattttggtttatggtaattttygtttygtaggattaagttattattttgatttagtttttygagtagttgggattataggtatttattattatggtyggttaatttttgttttttgtttttt

SEQ ID NO: 14800 - DNA, 201 bp, synthetic construct
  misc_feature 1..201: note = Description of Artificial Sequence: Synthetic polynucleotide
  source 1..201: mol_type = other DNA
aagtagttttttaaaattttaaaaagtaagtatagttttaggaaggagggaggttagtgaaattaaatttttgtygataagtttaaagtaattggtaagaygttgggaaattagatattgaaatattygtttttaatttttaatttgttattatttgaaataaagttattagggatagtygggygyggtggtttaygtttg

SEQ ID NO: 14801 - DNA, 201 bp, synthetic construct
  misc_feature 1..201: note = Description of Artificial Sequence: Synthetic polynucleotide
  source 1..201: mol_type = other DNA
atttattgaagaagttgaagtgtgaagtgtgaaattgaagaattttgaaatgtattgagtagtgaaaagattatgtatataaaaataggttggtygggtgyggaggtaggtagattatttgaggttaggaggygygatttyggtttattgtaagttttatttttygygtttaygttatttttttgttttagttttyggagt

SEQ ID NO: 14802 - DNA, 201 bp, synthetic construct
  misc_feature 1..201: note = Description of Artificial Sequence: Synthetic polynucleotide
  source 1..201: mol_type = other DNA
attttgggaggttaaggtaggyggttgggaggtgtaggttgtagtgagtygagattaygttattgtattttagtttgggtattattgagtattgagtgaaygagatttygtttgtaatttyggtatttygggaggtygaggttggyggattattygyggttaggggttggagatyggttyggttaatatagygaaattttg

SEQ ID NO: 14803 - DNA, 201 bp, synthetic construct
  misc_feature 1..201: note = Description of Artificial Sequence: Synthetic polynucleotide
  source 1..201: mol_type = other DNA
gtggygtaatttyggtttattgtaagtttygttttttaggtttatgttatttttttgttttagttttttgagtagttggtattataggygtygattattaygttyggttaattttttgtattttttgatagagayggggttttatygtgttatttaggatggtttygatattttgattttgtgattygtttgtttyggttt

SEQ ID NO: 14804 - DNA, 201 bp, synthetic construct
  misc_feature 1..201: note = Description of Artificial Sequence: Synthetic polynucleotide
  source 1..201: mol_type = other DNA
gagtgtagtggtgtgattttggtttattgtaagttttgttttttgggattatgttatttttttgttttagttttttgagtggttgggatttataggtgtttgttaatatgtttggttaattttttgtatttttagtagagatggggttttattgtgttagttaggatggttttgatattttgattttgtgatttgtttatt

SEQ ID NO: 14805 - DNA, 208 bp, synthetic construct
  misc_feature 1..208: note = Description of Artificial Sequence: Synthetic polynucleotide
  source 1..208: mol_type = other DNA
ttggttaatatgatgaaattttgtttttattaaaaatataaaaaattagttgggtgtggtggtgggtgtttgtagttttagttatttgggagattgaggttgaatggtgtgaatttgggaggtggagtttgtagtgagttgagattatattattgtattttagtttgggtgatagagtgagattttgttttaaaaataaataaataaa

SEQ ID NO: 14806 - DNA, 201 bp, synthetic construct
  misc_feature 1..201: note = Description of Artificial Sequence: Synthetic polynucleotide
  source 1..201: mol_type = other DNA
atatggtgaaattttgtttttattaaagtataaaaaattagttgggtatagtggtataggtttttagttttagttatttgggaggttgaggtaggagaattgtttgaatttgggaggtggagggtgtagtgagttattgtatgttagtttgggtaatagagttagattttgttttaaaaaaaaaaaaaaaaaagaaagaaa

SEQ ID NO: 14807 - DNA, 201 bp, synthetic construct
  misc_feature 1..201: note = Description of Artificial Sequence: Synthetic polynucleotide
  source 1..201: mol_type = other DNA
gttgaggtgggtgaattatttgaggttaggagtttaagattagtttggttaatatggtgaaattttatttttattaaaaatataaaaattaattgggtattgtggtgtgtgtttgtaattttagttatttgggagattgaggtaggagaattgtttgaattttgttggtagaggttgtaatgagttgagattgtattatgg

SEQ ID NO: 14808 - DNA, 201 bp, synthetic construct
  misc_feature 1..201: note = Description of Artificial Sequence: Synthetic polynucleotide
  source 1..201: mol_type = other DNA
ttttggaggttatatttggataggagttggtttttaattttagttaagagtttatagaggggtttttgtttaattgtatggagtttatggttgataggtgtggtggtaggatgggatgggattggatgggttgtgtatttgtttttatattagtattatattgttttgattattttagtttgtaagatgtttgaaatttat

SEQ ID NO: 14809 - DNA, 201 bp, synthetic construct
  misc_feature 1..201: note = Description of Artificial Sequence: Synthetic polynucleotide
  source 1..201: mol_type = other DNA
aaaattataataaagtttttgtttaattatagattttgatttattggttaggtaggttgtttggtttttgatttgtatttagagggtttttggattttggtgttgtgtgggttagtgttttgggagttggggattggtattggttgtgtttggttgttgagtgtgttttattaattattattttgtttttttaggttaatg

SEQ ID NO: 14810 - DNA, 201 bp, synthetic construct
  misc_feature 1..201: note = Description of Artificial Sequence: Synthetic polynucleotide
  source 1..201: mol_type = other DNA
gaggttttttttatttaggtaaagaagaaagaaggatggttttaggagtttatataatatggttaaaggttgggtagtgtgtagtagaatgtaagatgagtggttaggttatagggtgagattatgaaggatttttttttggttttaaatgttttttaagagtgtttttttattatttttttttttattttttaagaatag

SEQ ID NO: 14811 - DNA, 201 bp, synthetic construct
  misc_feature 1..201: note = Description of Artificial Sequence: Synthetic polynucleotide
  source 1..201: mol_type = other DNA
tttttaagtagttgggattataggtgtttgttattatgtttggttaatttttaatatttttagtagagatggggttttattgtgttagttaggatggttttgattttttgattttgtgatttgtttgttttggttttttaaagtgttgggattataggtttgagttattgtgtttggtttttagtttttatatttgttaaa

SEQ ID NO: 14812 - DNA, 201 bp, synthetic construct
  misc_feature 1..201: note = Description of Artificial Sequence: Synthetic polynucleotide
  source 1..201: mol_type = other DNA
ttaatataaaaattagttgttttagttgggtgtggtggtttaagtttgtaattttagtattttgggaggttgaggtgggtggattatgaggttaggagattgagattattttggttaatatggtgaaattttgtttttattaaaaatatataaaaaatgagttgggtgtggtggtaggtgtttgtagttttagttatttag

SEQ ID NO: 14813 - DNA, 201 bp, synthetic construct
  misc_feature 1..201: note = Description of Artificial Sequence: Synthetic polynucleotide
  source 1..201: mol_type = other DNA
taaattttgttgttgtttattttatgggtttatattgtttttatgagttgtaatatttattgtaaaggtttgtaggtttatttttgagttggtaagattatgaatttattagaagaaattttgaatatatttgaatattagaaggaataaattttggatatgttatttttaagaattgtaatatttattgtaagggtttgt

SEQ ID NO: 14814 - DNA, 201 bp, synthetic construct
  misc_feature 1..201: note = Description of Artificial Sequence: Synthetic polynucleotide
  source 1..201: mol_type = other DNA
ttttgttttagtttttttagtagttgggattataggtgtttgttattgtgtttggttaattttttgtatttttaatagaaatggggttttattgtggttttgattttttgattttgtgatttgttgtttattttggttttttaaagtgttgggattataggtgtgagttattgtgtttggtttttttttttatttttaata

SEQ ID NO: 14815 - DNA, 201 bp, synthetic construct
  misc_feature 1..201: note = Description of Artificial Sequence: Synthetic polynucleotide
  source 1..201: mol_type = other DNA
ggggttttattgtgttagttaggatggttttgattttttgattttgtaatatgtttgttttggttttttaaaatgttgggattataggtgtgagttattgtgtttagttggttttataggtatttatgtatattaatagtttttttttgagatggagttttgttttatttttaggttggagtgtaatggtgttgttttgat

SEQ ID NO: 14816 - DNA, 235 bp, synthetic construct
  misc_feature 1..235: note = Description of Artificial Sequence: Synthetic polynucleotide
  source 1..235: mol_type = other DNA
ttaattttttaggtgttgtttgttatttttttttttgattaggaaagggaattttttgattttttgtgtttttggagtgaggtaatgttttgttttgttttggtttatgtagggtgtgtgtatttattgatttgtgtttattgtttggtattttttagtgagatgaatttggtattttagatggaaatgtagaaattatttattttttgtgttgttttttttgggagttgtagat

SEQ ID NO: 14817 - DNA, 201 bp, synthetic construct
  misc_feature 1..201: note = Description of Artificial Sequence: Synthetic polynucleotide
  source 1..201: mol_type = other DNA
ggtagataaagatatatgattagggttggttgtggtgatttatgtttgtaattttagtattttgggaggttaaggtgaatggattatgaagttaggagattgagattattttggttaatatggtgaaattttgtttttattaaaaatataaaaaattagttgagtgtggtggtgggtgtttgtagtgttagttatttgggg

SEQ ID NO: 14818 - DNA, 201 bp, synthetic construct
  misc_feature 1..201: note = Description of Artificial Sequence: Synthetic polynucleotide
  source 1..201: mol_type = other DNA
taggtgatttttgtatttttatttgaggtattgggtttattttattagggagtgttagatagtgggtgtgggttagtgggtgtgtgtattatgtgtaagttgaagtagggtgaggtattgttttatttgggaagtgtaaggggatagggagttttttttttgagttaaaaaaaggggtgatagatgtatttggataattag

SEQ ID NO: 14819 - DNA, 201 bp, synthetic construct
  misc_feature 1..201: note = Description of Artificial Sequence: Synthetic polynucleotide
  source 1..201: mol_type = other DNA
agagatagaagttgttggagggtgagaggaatgtattagtggaagaagatagaagtggttggttatggagagtatgttagtagaagaatatatttatagatgttggtttgtttgtgggttttttggtaggttattgattggtgggatgaggtggagtttgttttgggtagtaggaggatagtttgggtatttagtggttta

SEQ ID NO: 14820 - DNA, 201 bp, synthetic construct
  misc_feature 1..201: note = Description of Artificial Sequence: Synthetic polynucleotide
  source 1..201: mol_type = other DNA
tttatagaggtaggtaggtttttttgagttgtggtgggttttatttagtttgagttttttggttgttttgtttatttaagtgagtttgggtaatggtgggtgttttttttttagttttgttgttgttttgtagtttgattttagattgttgtgttagtaattagtaagatttggtgggtataggattttttgagttaggtg

SEQ ID NO: 14821 - DNA, 201 bp, synthetic construct
  misc_feature 1..201: note = Description of Artificial Sequence: Synthetic polynucleotide
  source 1..201: mol_type = other DNA
gtttttttttttagttaaagaaaggggtgatagaaggtatttggaaaattgggttatttttattagaatattgtgtttttttgatgggtttaaaaaatggtgtatttggagattatatttggtatttggtttagagggttttatgtttatagagttttgttgattgttagtatagtagtttaagattaaattgtaaggtgg

SEQ ID NO: 14822 - DNA, 201 bp, synthetic construct
  misc_feature 1..201: note = Description of Artificial Sequence: Synthetic polynucleotide
  source 1..201: mol_type = other DNA
tgtttgttatttttttttttgatttggaaagggaattttttgattttttgtgttttttaggtgaggtaatgttttgttttgttttggtttgtgtatggtgtgtgtatttattggtttgtgtttattgtttggtatttttttagtgagatgaatttggtattttagatggaaatgtagaaattatttgttttttgtgttgtt

SEQ ID NO: 14823 - DNA, 201 bp, synthetic construct
  misc_feature 1..201: note = Description of Artificial Sequence: Synthetic polynucleotide
  source 1..201: mol_type = other DNA
gtaagtaaggggtgtgttttagttttgtttgtgttagagtttttttatttttattatttggtaggtttagtgtttgggaataatgatgtatgtggataagtggagggtgagtaaggtgaagaggagttttattgagtaatagaatagtttagaggagatttgtggtgggtagtttttttttgtagttagggtgttttgatg

SEQ ID NO: 14824 - DNA, 201 bp, synthetic construct
  misc_feature 1..201: note = Description of Artificial Sequence: Synthetic polynucleotide
  source 1..201: mol_type = other DNA
ggtagattatttgaggttaggagtttgagattagtttggttaatatggtgaaattttgtttttattaaaaatataaatattagttgggtgtggtggtggttgtttgtaattttagttatttgggaggttgaggtaggagaattgttggattttgggaggtagatgttgtagtgagttaagattatgttattgtattttagt

SEQ ID NO: 14825 - DNA, 201 bp, synthetic construct
  misc_feature 1..201: note = Description of Artificial Sequence: Synthetic polynucleotide
  source 1..201: mol_type = other DNA
ttgtagtatatattattatttttttagtatattattattttttaatttggtttttattgttaataaagttgttggttgtaggaatgagagagtggtagaatgatatttttgttttattttttgggattttttagttgttggtggttttaagtttttaggagttatggtgttttttttttttagatgttagtgttaatagtg

SEQ ID NO: 14826 - DNA, 201 bp, synthetic construct
  misc_feature 1..201: note = Description of Artificial Sequence: Synthetic polynucleotide
  source 1..201: mol_type = other DNA
ggttagaagatggtgagtggaaagtttgggtgtgtggagagattttaagaaggggttgtttagttgtgaattttgtatttgttgtttgtgttttatttggtggttttgaaattaggtttttatttggatttttgtgagttgtatatttttggttagttatttttgttttagagggtttagatattggtagtgttggaagac

SEQ ID NO: 14827 - DNA, 207 bp, synthetic construct
  misc_feature 1..207: note = Description of Artificial Sequence: Synthetic polynucleotide
  source 1..207: mol_type = other DNA
gtttttgtgatttttgtagttagtgaattagtatatttttggggttgaagttatgtgttaggtatgttagtgttattagtttgtttagggttagtttttttgatggtggtggtagtaggtggattttgggttggaatgtgttttttggagggtagagagttaggttagggggttgggtaggggatgagagagtttttttgttttggt

SEQ ID NO: 14828 - DNA, 201 bp, synthetic construct
  misc_feature 1..201: note = Description of Artificial Sequence: Synthetic polynucleotide
  source 1..201: mol_type = other DNA
tttatggggtagttagaagggagatggtttttttttggagttggggtgtttggtagttttggtttttttttgattgtttaggttaatttttgtttttttttgttggtttatggtttattggtttttgggtgtttgttagtgtgtttttttgttggggtgtttttatggatgattagtgtttgtgttttttttttttgatgt

SEQ ID NO: 14829 - DNA, 201 bp, synthetic construct
  misc_feature 1..201: note = Description of Artificial Sequence: Synthetic polynucleotide
  source 1..201: mol_type = other DNA
gaagatgggtgatttttgtatttttatttgaggtattggttttattttattagggagtgttagatagtgggtgtaggttagtgggtgtgtgtattgtgtgtgaagtagggtgaggtattgttttatttgggaagtgtaaggggttagggagttttttttttgagttaaagaaaggggtgatggatgtatttggaaaattgg

SEQ ID NO: 14830 - DNA, 201 bp, synthetic construct
  misc_feature 1..201: note = Description of Artificial Sequence: Synthetic polynucleotide
  source 1..201: mol_type = other DNA
ggggtgtggttttttggagggaattagtgtggagatgtttgtgtgtttggggtgtggttttttggagggagttagtgtggagatgtttgtgtgtttggggtgtggtttattagagggagttagtgtggagatgtttgtgtgtttggggtgtggttttttggagggaattagtgtggagatgttggtgtgtttggggtgtgg

SEQ ID NO: 14831 - DNA, 201 bp, synthetic construct
  misc_feature 1..201: note = Description of Artificial Sequence: Synthetic polynucleotide
  source 1..201: mol_type = other DNA
gatgttttttattttttagatggggtggtggtggggtagagatattttttagtttttagatggggttgtggtttggtagaggtgttttttatattttagatgatgggtggttgggtagagatgttttttattttttagatgggatgatggttaggaagaggtgttttttattttttagattgggtggttgggtagaggggt

SEQ ID NO: 14832 - DNA, 201 bp, synthetic construct
  misc_feature 1..201: note = Description of Artificial Sequence: Synthetic polynucleotide
  source 1..201: mol_type = other DNA
gagtatagtgttggtgggttggtattgttgggggatttggtgtattttttatagttgttgttttgggtggtaagttttttattgtttggggttggtggggtggttagttgtttggagtgtggggtttgttaaggttatgtttatttagaatttgttttggtttattgtgagtagttttagtttttgttttgtgtttttttt

SEQ ID NO: 14833 - DNA, 201 bp, synthetic construct
  misc_feature 1..201: note = Description of Artificial Sequence: Synthetic polynucleotide
  source 1..201: mol_type = other DNA
tttttgagtagttggggttataggtgtttattattatgtttggttaattttttgtatttttagtagagatggggttttattgtgttagttaggatggttttgattttttgatgttgtgatttattgttttggttttttgaaatgttgggattataggtttgagttattgtatttggttatatttatttatttttaattaga

SEQ ID NO: 14834 - DNA, 201 bp, synthetic construct
  misc_feature 1..201: note = Description of Artificial Sequence: Synthetic polynucleotide
  source 1..201: mol_type = other DNA
ttttttttttttttgattggttttgtttttattgttggttttgtttttattgttggtttgggttttatttatgttggagttgttttatttaaggagattgtgtagttggaaagttatatgtgtgagtttagaggtgggttttggttgtagatttgttatggtttttgaagtttttgtgtgtttaggggtgttttttggttg

SEQ ID NO: 14835 - DNA, 201 bp, synthetic construct
  misc_feature 1..201: note = Description of Artificial Sequence: Synthetic polynucleotide
  source 1..201: mol_type = other DNA
gttagttagttattttgagatggagttttgttttgttgtttaggttgtagtgtagaattgtttttttggtttattgtaatttttattttttgggtttaagtgataattttgttttagttttttaagtagttggaattatagatgtgtattattatgtttaattaatttttgtatttttagtagagatggggttttgttata

SEQ ID NO: 14836 - DNA, 201 bp, synthetic construct
  misc_feature 1..201: note = Description of Artificial Sequence: Synthetic polynucleotide
  source 1..201: mol_type = other DNA
gtggttttttttgatttagattgtttttaaatattgaatgttgaattgggttgggtgtggtggtttttatttgttattttagtattttgggaggttgaggtgggtggattatgaggttaggagattgagattattttggttaatatggtgaaattttgtttttattaaaaatataaaaaaaaaaaattagttgggtgtgat

SEQ ID NO: 14837 - DNA, 201 bp, synthetic construct
  misc_feature 1..201: note = Description of Artificial Sequence: Synthetic polynucleotide
  source 1..201: mol_type = other DNA
ttatttttgttttttattttgggggttttatgattttggagtttttatgttttggtatagagtttgtttttttgggattgggttttggttgagtagatattgtttagttgttttttgattagtgttttttgttttgtgtttggttggtattggtggtttgttgagtttagtttggtattttgttggtattggtggtttgtt

SEQ ID NO: 14838 - DNA, 380 bp, synthetic construct
  misc_feature 1..380: note = Description of Artificial Sequence: Synthetic polynucleotide
  source 1..380: mol_type = other DNA
ttttattaaaatataaaaaattggttgggggtggtggtatgtgtttgtagttttagttatatgggaggttgaagtaggggaattgtttgaatttgggaggtggagattgtagtgagttgagattgtgttattgtattttaatggtattttagtttgatgatagagtgagattttgttttaaaaataataataaataaataaataaataaataaaaattagttgggtgtggtggtgtgtgtttgtagttttagttatttgggagattgaggtaggagaattgtgggaatttgggaggtggaggttgtagtgagttgagattgtgttattgttttgtagtatggagatagagttagattttgtttaaaaaaaaaaaaaaaaa

SEQ ID NO: 14839 - DNA, 201 bp, synthetic construct
  misc_feature 1..201: note = Description of Artificial Sequence: Synthetic polynucleotide
  source 1..201: mol_type = other DNA
aggtgggtggattatgaggttaggagattgagattattttggttaatatggtgaaattttgtttttattaaaaatataaaaaattagttgggtgtggtggtgggtatttttagttttagttatttgggaggttgaggtaggagaatggtgtgaatttgggaggtggagtttgtagtgagttgagattgtgttattgtattt

SEQ ID NO: 14840 - DNA, 201 bp, synthetic construct
  misc_feature 1..201: note = Description of Artificial Sequence: Synthetic polynucleotide
  source 1..201: mol_type = other DNA
aaaaattagtttggtgtggtggtatgtgtttgtaattttaattatttgggaggttgtggtaggtgaattatttgaagttgggaggtgaaggttgtagtaatgttgttttttgtattggatgaagtgttttttattaaatttttttattggagagggtgggatttgtgggttttttgggtggtttgattttgatattttgtg

SEQ ID NO: 14841 - DNA, 201 bp, synthetic construct
  misc_feature 1..201: note = Description of Artificial Sequence: Synthetic polynucleotide
  source 1..201: mol_type = other DNA
atggtgaattgtggtgattgtgatgtgtttttttattttttttttggtggattttttttatttgttttttttttaatttttaataagtttttattattgatgatgtgagatgatgatggtatgggattttttattttgttagggttaatgaattttatattatgagttgtatgaggtatgagggagtttttaagggaggaa

SEQ ID NO: 14842 - DNA, 201 bp, synthetic construct
  misc_feature 1..201: note = Description of Artificial Sequence: Synthetic polynucleotide
  source 1..201: mol_type = other DNA
gatgtagaagatgggtgatttttgtatttttatttgaggtattgggtttattttattagggagtgttagatagtgggtataggttagtgggtgtgtatattgtgtgtgagttgaagtagggtgaggtattgttttatttgggaagtgtaaggggttagggagttttttttttgagttaaaggggtgatggatgtatttgga

SEQ ID NO: 14843 - DNA, 201 bp, synthetic construct
  misc_feature 1..201: note = Description of Artificial Sequence: Synthetic polynucleotide
  source 1..201: mol_type = other DNA
taaataattagggataaagagtattatattgttgaatttattttatttttaattttttttttaaattttttataaaaaattagttgggtgtggtggtgggtgtttgtagttttagttatttagagattgaggtaggagaatggtgtgaatttgggaggaggagtttgtagtaagtggagattgtgttattgtattatagtt

SEQ ID NO: 14844 - DNA, 201 bp, synthetic construct
  misc_feature 1..201: note = Description of Artificial Sequence: Synthetic polynucleotide
  source 1..201: mol_type = other DNA
atttttgtgatttatattttatttgtatattttttttttttttgaaaatttttaataaaaatttgttggttttatggtttaggggtattatagaatttattgatatgtgatgttttttttggatgtttggttttaaaattttttttttttgtattttgtttttttattttttaatttggttgatgtttagggaaaatagaa

SEQ ID NO: 14845 - DNA, 201 bp, synthetic construct
  misc_feature 1..201: note = Description of Artificial Sequence: Synthetic polynucleotide
  source 1..201: mol_type = other DNA
ttttggtgaatttttattgttataattttaaaaatttggtttagggaggagtttattttttattttttatataggtgatatatgtagaaatataatttgttgttgtgtttgtgtggttaggattttttttttatatgtaatgatttagttgattagtttaagatatgtttggtttttatgtttgtttgtaggggtattgtt

SEQ ID NO: 14846 - DNA, 201 bp, synthetic construct
  misc_feature 1..201: note = Description of Artificial Sequence: Synthetic polynucleotide
  source 1..201: mol_type = other DNA
ttgggagtagaggttttttggaaggtattatttttagagtgtgtttttgagtaattttgaggatgggttttgggttattattgtgtgttggaaatagtagtgtttaggttgttggaggaggttggtttttttggtaggttttggttgtgtttagagttttgtgggttttggagataaggttttggtttgaggtttttgggg

SEQ ID NO: 14847 - DNA, 201 bp, synthetic construct
  misc_feature 1..201: note = Description of Artificial Sequence: Synthetic polynucleotide
  source 1..201: mol_type = other DNA
gtttgagtaggataaggattttagagtttaagagaattttgatgattagagaagggtttttgaggttattggggatgtatggtttgtattttggtttttgtgggataatggaggtttttttttttttttgtgtttgggtttgggtttttgtagatagatttttatatttagaggtgagaaattagatataattagatattt

SEQ ID NO: 14848 - DNA, 201 bp, synthetic construct
  misc_feature 1..201: note = Description of Artificial Sequence: Synthetic polynucleotide
  source 1..201: mol_type = other DNA
ttatatgttaggttataaaataagtttttagaaatttaagaagattgaaattatattaattattttttaaaaaaaataggtggttgggtgtggtggtttatgtttgtaattttagtattttgggaggttgagatgggtggattatgaggttaggagattgagattattttggttaatatggtgaaattttgtttttattaa

SEQ ID NO: 14849 - DNA, 568 bp, synthetic construct
  misc_feature 1..568: note = Description of Artificial Sequence: Synthetic polynucleotide
  source 1..568: mol_type = other DNA
ttagtatatagatataaaaatgagaggtgatagtgtgttggtagtttttatagtttttgtttttttttggtatttttttggttttggtgtttattttggttgtgtttgaggagttttttagtttgttgttgtattgtgggagtttttttttgggttggataaggttggagttggtttttttagtttgtgggtaggtgtggagagagaggtgtgggtgggaattgtggttgtaggttgtgtttgtgggttagtttgagttttgggtgggtgtgggtttggtaagttttgtatttggagtggttagttggtttgggtagtgaggagtttagtatttgggttagtagttgttgtgtttgattttttgttgggttttagttgtttttttgttgggtagggtttgggatttgtagttttttatgtttgagtttttatttttgttgtgtgtttttgtgtagtttaagtttttttgatgagtgttaatttttgttttatggtgtttagttttattgattgtttaagggttgaggagtgtgggtatatggtgttggattggtaggtagttttattt

SEQ ID NO: 14850 - DNA, 201 bp, synthetic construct
  misc_feature 1..201: note = Description of Artificial Sequence: Synthetic polynucleotide
  source 1..201: mol_type = other DNA
tttattaaaaatataaaaaattagttgggtattatggtgggtgtttgtagttttagttatttgggaggttgaggtaggagaatggtgtgaatttgggaggtggagtttgtagtgagtggagattgtgttgttgtattttagtttgggtgatagagtatgagtttgttttaaaaaaagaaaaaaaagaaagaaaagaaaaga

SEQ ID NO: 14851 - DNA, 201 bp, synthetic construct
  misc_feature 1..201: note = Description of Artificial Sequence: Synthetic polynucleotide
  source 1..201: mol_type = other DNA
gggttggttaaggttggagttggttttttttgtttgtggggaggtgtggagggagaggtgtaggtgggaattagggttgtgtggggtgtttgtgggtaagtgtgagttttgggtgggagtgggtttggtaaatttattttagggtgttttgttttttataaagaaaattttttttggggtttttatgggtttttttgggat

SEQ ID NO: 14852 - DNA, 201 bp, synthetic construct
  misc_feature 1..201: note = Description of Artificial Sequence: Synthetic polynucleotide
  source 1..201: mol_type = other DNA
ttttaagtagttgggattataggtatttgttattatgtttggttaattttttgtattttttagtatagatggggttttattgtgttaattaggatggttttgattttttgattttgtgatttgtttgttttggttttttaaagtgttgggattataggtgtgagttattgtgtttagttatatattatattttttttattt

SEQ ID NO: 14853 - DNA, 201 bp, synthetic construct
  misc_feature 1..201: note = Description of Artificial Sequence: Synthetic polynucleotide
  source 1..201: mol_type = other DNA
aattatggggtgaattttgttatggggatatgtatttggggggaaggttgtgatgggaggggtatttgggttaaatatgggtggttgttagtgaagagtttgtaagatagagtaggagttagggggaatagggagggaggggtattttttttttttttttttgagatggagttttattttgttttttaggttggagtgtag

SEQ ID NO: 14854 - DNA, 201 bp, synthetic construct
  misc_feature 1..201: note = Description of Artificial Sequence: Synthetic polynucleotide
  source 1..201: mol_type = other DNA
tataggagtataaaagggttggtggttttgtttgggtatattgtttgtttttttatttatttgtgtattttagtttattatttttgagttgggtgtagtatgtggtttagagaatgggaagggatttatgagtgtttgatatatataattattgttgttggtgattatttttatttatgagtggtgtatggatggggttag

SEQ ID NO: 14855 - DNA, 201 bp, synthetic construct
  misc_feature 1..201: note = Description of Artificial Sequence: Synthetic polynucleotide
  source 1..201: mol_type = other DNA
taaaggtttgtttttgtatttaagtatttgagtttttaagagttagtttttgggtttttttggagtaaggttttgtttggttttatgtatttgttttgtttgttgtgatggtgagtttgttgttgggtttgtttttgttaatttggtttttggtgtatatgtggatgttgtaggtggaggaagggtggatattaatgatgg

SEQ ID NO: 14856 - DNA, 201 bp, synthetic construct
  misc_feature 1..201: note = Description of Artificial Sequence: Synthetic polynucleotide
  source 1..201: mol_type = other DNA
tttggttggttttgggatttgttttttggtggttaagtagtggttatgaaagtttagttgttgttatatttttgaggaattggtgtatttttgtttatagtggtagttgggggtatttatgtggtttggggttgttttgatttggtagtgtatgggggttgttgtttgggttttttagtgtgttatttgtgtgttttttgt

SEQ ID NO: 14857 - DNA, 201 bp, synthetic construct
  misc_feature 1..201: note = Description of Artificial Sequence: Synthetic polynucleotide
  source 1..201: mol_type = other DNA
tttggtgttggtatttattagtgtggttagtttggttgaagttttgtggaagggtgggattaggtgttgtattgttgtgtttagggattggaattggtgttgtttgtaggttatgaggtttattatggagtttagtgttgtattttgtgagaggggtggatgtgggggttgtagggattttagatggtttgggattgattt

SEQ ID NO: 14858 - DNA, 201 bp, synthetic construct
  misc_feature 1..201: note = Description of Artificial Sequence: Synthetic polynucleotide
  source 1..201: mol_type = other DNA
tggttattttgggagtttgttgttgatgaattgtagtatggttatttgggttgtttattttgtatggttatgttgtttggttattgttgtaggtatgttttgttttgtttaattttttggttggtggggttatttgggtgtttgtatatgattttttttgagagggttagaggttggtttaattatttgtaaataatgtta

SEQ ID NO: 14859 - DNA, 201 bp, synthetic construct
  misc_feature 1..201: note = Description of Artificial Sequence: Synthetic polynucleotide
  source 1..201: mol_type = other DNA
ttagtatataggatatttatgtgtgtttattatttggtatatgggagatttatgtgtgtttattgttgggtataggggagatttatgtgtgtttattgtttggtatatgagagatttatgtgtgtttattgtttggtatagggagatttatgtgtgtttattgtttggtataggggagatttatgtgtgtttattgtttgg

SEQ ID NO: 14860 - DNA, 201 bp, synthetic construct
  misc_feature 1..201: note = Description of Artificial Sequence: Synthetic polynucleotide
  source 1..201: mol_type = other DNA
aggggaatagtaatagaagttttatttattaggtatttattgtgtgttaagtattgtgttaagggttttatagaataatagtataagaattttggttgggtgtagtggtttatttttgtaattttagtattttgggaggttgaggtgggtggattatgaggttaggagttagagagattagtttagttaatatggtgaaat

SEQ ID NO: 14861 - DNA, 201 bp, synthetic construct
  misc_feature 1..201: note = Description of Artificial Sequence: Synthetic polynucleotide
  source 1..201: mol_type = other DNA
tgtatgtattgtgtgtgagttgaagtagggtgaggtattgttttatttgggaagtatgaggggttagggagtttttatttttagttaaagaaaggggtgatggatgtatttggaaaattgggttatttttatttgaatattgtgtttttttggtgggtttaaaaaatggtgtattatgagattatattttatatttggttc

SEQ ID NO: 14862 - DNA, 201 bp, synthetic construct
  misc_feature 1..201: note = Description of Artificial Sequence: Synthetic polynucleotide
  source 1..201: mol_type = other DNA
gtttgttattatgtttggagaattttttgtatttttagtggagataggtttttattatgttagttaggatggttttgattttttgattttgtgatttgtttgttttggttttgtaaagtgttgggattataggtgtgaggtatagtgtttggttttgattgttttatttaaagtaatgaaagtatagttggttttaaagga

SEQ ID NO: 14863 - DNA, 201 bp, synthetic construct
  misc_feature 1..201: note = Description of Artificial Sequence: Synthetic polynucleotide
  source 1..201: mol_type = other DNA
tttgtggttagttggattaggtggttggtagtgagatggaataagtagattaggttgagggtgaaggtgtaggtgattagtagtatggataagaggttgttgtttgttattttttttattgtttggtttagtatttatttatttgtttgtagtaagtttagtagtattattttggttgttgttgttattttattttgttgg

SEQ ID NO: 14864 - DNA, 201 bp, synthetic construct
  misc_feature 1..201: note = Description of Artificial Sequence: Synthetic polynucleotide
  source 1..201: mol_type = other DNA
ttagattgttttttttttgagatagagttttgttttgttatttaggttagagtgtggaggtgtgattttagtttattgtaagttttgttttttgggtttatgttatttttttgttttagttttgtgagtagttgggattataggtgtttgttattgtgttggttaatttttttggtatttttagtagagatagggttttat

SEQ ID NO: 14865 - DNA, 201 bp, synthetic construct
  misc_feature 1..201: note = Description of Artificial Sequence: Synthetic polynucleotide
  source 1..201: mol_type = other DNA
atagtttattaaaaatataaaaaaaaaaaaaaaaaaatttgttgggtgtggtggtgtgtgtttgtaattttagttatttgggaggttgaggtaagagaattgattgaatttgggaggtagagattgtagtgagtttagattatgttattgtattttagtttggataagagtgagattttattttaaaaataaaaataaaaa

SEQ ID NO: 14866 - DNA, 201 bp, synthetic construct
  misc_feature 1..201: note = Description of Artificial Sequence: Synthetic polynucleotide
  source 1..201: mol_type = other DNA
tgtttttttttgttttgagatggagttttattttattgtttaggttggagtgtagtggtgttattttggtttattgtaatttttattttttgggttttagtgatttttttgttttagttttttaagtagttgggattgtaggtgtttataattatgtttggttaatttttgtgtttttagtagagttggagttttattatg

SEQ ID NO: 14867 - DNA, 201 bp, synthetic construct
  misc_feature 1..201: note = Description of Artificial Sequence: Synthetic polynucleotide
  source 1..201: mol_type = other DNA
tgtttgttattaagtttagttaatttttgtatttttagtagagatggggttttattgtgttggttaggttggttttgaatttttgattttgtgatttgtttgttttggttttttaaagtgttaggattataagtgtgagttattgtgtttggttttttaaatggtatttttgattttttttttttagtttttaaagtaggt

SEQ ID NO: 14868 - DNA, 201 bp, synthetic construct
  misc_feature 1..201: note = Description of Artificial Sequence: Synthetic polynucleotide
  source 1..201: mol_type = other DNA
gttaaggtgggtggattatttgaggttaggagtttgagattagtttggttaatatggtgaaattttatttttattaaaaatatggaaaaaattagttgggtggggtttgagtttgtaattttagttatttgggagttgaggtgtgagaattgtttgaagttgggagggggaggttgtaggagtagaggttgtgttattgta

SEQ ID NO: 14869 - DNA, 201 bp, synthetic construct
  misc_feature 1..201: note = Description of Artificial Sequence: Synthetic polynucleotide
  source 1..201: mol_type = other DNA
ggtttgtatggtgtgtgattatttttagtggaagttttaatatgggtgtggtttagttttttagggttttttaaggtagaggtggtttgggtttttgtagtgattttataatatattttaattgtagatggtggagattgtgggttgttttttggtttaagtggttttggggtttttgttttgtgtggagttatttgtgtt

SEQ ID NO: 14870 - DNA, 201 bp, synthetic construct
  misc_feature 1..201: note = Description of Artificial Sequence: Synthetic polynucleotide
  source 1..201: mol_type = other DNA
gtgttttgggttattgagagaagtgaaatattgtagatatggtagaggtgttttttttttttttttgtttttagatgtggtttttatatgtaggttgatgtgttttttttttatttatgtttgtttggttttgttatatatgttgttgtgttgttggttttgaatgtgtatgagtggtttgtgttggggttagtggaggtt

SEQ ID NO: 14871 - DNA, 234 bp, synthetic construct
  misc_feature 1..234: note = Description of Artificial Sequence: Synthetic polynucleotide
  source 1..234: mol_type = other DNA
aggggttatatttatggatttttttttttttggtaggaagatgagtgattatatttttgttattattgaattgagtgttttgtttgtttggtgttagtattgtttgtattattattttgattttatttattattgtttggtggatgggtggaggttttggtaggtttgtgatatggtgtattattttattattgaagttatttaggaatggtggtgggtattgtgttagtaggg

SEQ ID NO: 14872 - DNA, 201 bp, synthetic construct
  misc_feature 1..201: note = Description of Artificial Sequence: Synthetic polynucleotide
  source 1..201: mol_type = other DNA
ggggttttttgtttttagtattgttagtttaggtgtgttttttatggtgtgatgtgtttgtagatttggaaatattataggatttaggtattttatggagtgtttgttttgtgttagttttagtttagtgttttttagatattgtttgattttttggaggtagttattgatattgtgtttattgtatagatgagaaagttg

SEQ ID NO: 14873 - DNA, 201 bp, synthetic construct
  misc_feature 1..201: note = Description of Artificial Sequence: Synthetic polynucleotide
  source 1..201: mol_type = other DNA
tttttagtgagatgaatttggtattttagatggaaatgtagaaattatttgttttttgtgttgtttatgttgggagttgtagattggagttgtttttatttggttattttggttttttttttttgttttttttttgagatagtgtttttttttatttttgttatttaggttgtagtgtagtggtgtggtttgtgtttattg

SEQ ID NO: 14874 - DNA, 201 bp, synthetic construct
  misc_feature 1..201: note = Description of Artificial Sequence: Synthetic polynucleotide
  source 1..201: mol_type = other DNA
taattttattttgtttttgagatagagttttgttttgttgtttaggttggagtgtagtggtgtaattttggtttattgtaagttttgttttttgggtttatgttatttgtttgttttagttttttgaataattgggattataggtgtttgttattatgtttggttaaatttttgtatttttagtagagatggggttttatc

SEQ ID NO: 14875 - DNA, 201 bp, synthetic construct
  misc_feature 1..201: note = Description of Artificial Sequence: Synthetic polynucleotide
  source 1..201: mol_type = other DNA
atttttagggttgtggatggtagaattaaaagagttaattagtaagtagaattgttttttttggggttttaaggtttgagtattttttttggggtgttattgtattttttttggggtgatatgtttggtttagttgtaagttttgtttagaatttgtttgtgtattggtgtttggaatagttagttggattttatatttat

SEQ ID NO: 14876 - DNA, 201 bp, synthetic construct
  misc_feature 1..201: note = Description of Artificial Sequence: Synthetic polynucleotide
  source 1..201: mol_type = other DNA
ggtttttgtagggagtttatattagtagttttttattttgaggagatatgtgggttttttttttgaagtttgtttaggaggtagatggagtgatttgatttggaggataggagggtgtttaggggttttggtgttatagtttttataggatgattttggagtgtttttggattttgagttgttttggttaaggagttgtat

SEQ ID NO: 14877 - DNA, 201 bp, synthetic construct
  misc_feature 1..201: note = Description of Artificial Sequence: Synthetic polynucleotide
  source 1..201: mol_type = other DNA
tatatataggtgtggatatttatatggtttttggtagtgttgtaggaggttagtatagagatgtgttgaggagtttgagatgtttgtttttttgggttattgtgtgtaaaggttgtttttgttgtggatttttatatgtgtgatatatatgaataggtgaaatggatatgtatggtttttatatatgtgagttgggttttt

SEQ ID NO: 14878 - DNA, 201 bp, synthetic construct
  misc_feature 1..201: note = Description of Artificial Sequence: Synthetic polynucleotide
  source 1..201: mol_type = other DNA
tttttgtgaaggtattaagtatggtagatgtttttatattgttggggtttgtttttttgtggatgggaagtgggaatgtgatgtggatgtgatgtgggaatgtaatgtgatgtgatgtgatgtgatgtggtatggtgtgaggatagtgtggtgggagtggtgttttagatttagtagggagggagatgaaaggtggatgga

SEQ ID NO: 14879 - DNA, 201 bp, synthetic construct
  misc_feature 1..201: note = Description of Artificial Sequence: Synthetic polynucleotide
  source 1..201: mol_type = other DNA
gttgggtgtggtggtatgtgtttgtagttttagttatttaggaggttgaggtaggagaattttttgaatttgggatgtagaggttgtagtgagttgagattgtgttattgtattttagtttggtaatagagtgagattttggtttaaaaaaaaaaaaaaagaaaaaaaaaaaaaaaagaaggagttgaggttttaagaatt

SEQ ID NO: 14880 - DNA, 201 bp, synthetic construct
  misc_feature 1..201: note = Description of Artificial Sequence: Synthetic polynucleotide
  source 1..201: mol_type = other DNA
ttgtattttgtgggtaggggatattttttttagtggttggtgatgattgtgattttatttgttgagttttgtgggagttttggtagttttttgtaattgttggttggttgttattgttttagtgtttgttttttgattggttagtaaattatggtggtagatagaaaaaagatagtttttttttttagggttgttttataa

SEQ ID NO: 14881 - DNA, 201 bp, synthetic construct
  misc_feature 1..201: note = Description of Artificial Sequence: Synthetic polynucleotide
  source 1..201: mol_type = other DNA
ttttgttggtgtattttgttggtgtattttgttggtgtattttgttggtgtattttgttggtgtattttgttggtgtattttgttggtgtattttgttggtgtaagttgtgttttgggattgggtttgaaaagggaggagttatttattttaagtttttaggtttggggagaattttatagtaagttttttgggagtttga

SEQ ID NO: 14882 - DNA, 686 bp, synthetic construct
  misc_feature 1..686: note = Description of Artificial Sequence: Synthetic polynucleotide
  source 1..686: mol_type = other DNA
gtggtatttgtaggtttttaggattaggtagaggatttagtttttttaggattggggttttggtgttgtgttttaggggaggttgatgggggttgggaggtgtttagggtgggaatttagtgtatgggtgaggattttaaaaagtaaggggtaggatgagttaataaggttttgagtaggaaaattatgtgataggaagtgtatatattgttttatagtagaaagattggggatgggattagtttttaagtgattttaaatttaaaaggaagtaatttttagatttttatgggtgttttaatttgttttgggtgaaggaagataggtaagaatttttaggtttgtgaggattttatgttttagggatagaagtgttagggatttgggaagtgtagatttaatataaggtagagtaaaatttatgtgttttggtaggatttttattttatgtgatttatttttgggtttgttgtgtaggatagaagttagttttgggtggggtttttgaatatggtggtggggtttgggtgggatagaggtggggtgtgaggtggagagattttgttttttagaataggtaaagggtggggttgggattagatttgtgtatttttttgttttgtatttagtgtttttgttttttgggtgtttggaggtgagagtggttaggaaggttgaggtatgat

SEQ ID NO: 14883 - DNA, 201 bp, synthetic construct
  misc_feature 1..201: note = Description of Artificial Sequence: Synthetic polynucleotide
  source 1..201: mol_type = other DNA
gttagagtgtagtggtgtgattttggtttattgtaagttttgttttttgggtttatgttatttttttgttttagtttttttagtagttgggataggggtatgttgttatgtttggttagtttttgtatttttagtagagatggggttttattatattagttaggatggttttgattttttgattttgtgatttgttagttt

SEQ ID NO: 14884 - DNA, 201 bp, synthetic construct
  misc_feature 1..201: note = Description of Artificial Sequence: Synthetic polynucleotide
  source 1..201: mol_type = other DNA
gttagagattttgtttttaaaagtaaaaaagaaaaaaaaagtttttttttaagttattatatattttgaataattaatattgaaaattgttggttgggtgtggtggtttatgtttgtaattttagtattttgggaggttgaggtggggtggattatgagattagtagaatggtgtgaatttggaaggtggagtttgtagtg

SEQ ID NO: 14885 - DNA, 201 bp, synthetic construct
  misc_feature 1..201: note = Description of Artificial Sequence: Synthetic polynucleotide
  source 1..201: mol_type = other DNA
ttgtatttttatttgaggtattgggtttattttattagggagtgttagatagtgggtgtaggttagtgggtgtgtgtattgtgtgtgagttgaagtagggtgaggtattgttttatttgggaagtgtaaggggttagggagttttttttttgagttaaagaaaggggtgatggatgtattttgaaaattgggttattttta

SEQ ID NO: 14886 - DNA, 201 bp, synthetic construct
  misc_feature 1..201: note = Description of Artificial Sequence: Synthetic polynucleotide
  source 1..201: mol_type = other DNA
atgtatttattgatttgtgtttattgtttggtagtttttagtgagatgaatttggtattttagttggaaatgtagaaattattattttttgtgttgtttatgttgggagttgtagattggagttgtttttatttggttatgttggttttttttttggatataattatttttgtatttatttaatttttatttttatggaat

SEQ ID NO: 14887 - DNA, 201 bp, synthetic construct
  misc_feature 1..201: note = Description of Artificial Sequence: Synthetic polynucleotide
  source 1..201: mol_type = other DNA
tttttatgtgattattgtttgtttgttagtgttagttttttttgattttaaattataagtggaagaaagtatgttagaaatttatagaattggtttggtgtggtggtttaggtttgtaattttagtattttgggaggttgaggtaggtggattatgaggttaggagattgagattattttggttaatagggtgaaattttg

SEQ ID NO: 14888 - DNA, 201 bp, synthetic construct
  misc_feature 1..201: note = Description of Artificial Sequence: Synthetic polynucleotide
  source 1..201: mol_type = other DNA
aagttttttttttttttttttttttttttttttgagatggagttttatttttttgtttaagttggattgtagtggtgttattttggtttattgtaagttttgttttttgggtttatgttatttttttgttttagttttttgagtagttgggattataggtgtttattattatgtttggttaattttttgtatttttagtag

SEQ ID NO: 14889 - DNA, 201 bp, synthetic construct
  misc_feature 1..201: note = Description of Artificial Sequence: Synthetic polynucleotide
  source 1..201: mol_type = other DNA
tgtttggtgtatgttgtggagggtgtgggtaatggtgtatattgtattaattataaattgtattttgtttttttgtttgtaggtggagttttggttgatgtgttttttgtttgttttagggatgtttagagaaagtgtgtttggtttttatgtattgaatttggttttttgttttttttttttttatttttattatttttt

SEQ ID NO: 14890 - DNA, 201 bp, synthetic construct
  misc_feature 1..201: note = Description of Artificial Sequence: Synthetic polynucleotide
  source 1..201: mol_type = other DNA
gattttagggggttttattttagtggttttttttattttttttgtagagaaaaaagagtgttggtgggattattgtttattgtgtgtttaggaggtgttttgtaatatggtgtattttaatgtgatttgtgatggttgtaatgggtttgtggtaggaatttgttataagtgtagtgtttgtttagattatgatttgtgtag

SEQ ID NO: 14891 - DNA, 201 bp, synthetic construct
  misc_feature 1..201: note = Description of Artificial Sequence: Synthetic polynucleotide
  source 1..201: mol_type = other DNA
ggtattttatttatttagagatagagttttgttgtgatgtttaggttggagtgtatggtgtaattttggtttattgtaggttttgttttttgggttttagtgatttttttgttttagttttttgagtagttggggttatagttatgtgttattatgttgggttaatttttgtatttttagtagagatagggtttttttata

SEQ ID NO: 14892 - DNA, 201 bp, synthetic construct
  misc_feature 1..201: note = Description of Artificial Sequence: Synthetic polynucleotide
  source 1..201: mol_type = other DNA
ttattatgtttaattaattttttttatttgtagtagagatagggttttattgtgttagttaggatggttttgattttttgattttgtgatttgtgtgttttggttttttaaagtgttgggattataggtgtgagttattgtgtttggtttgtaaatattttttgtgttttagtgggttatgtttttattttgttgattgtt

SEQ ID NO: 14893 - DNA, 227 bp, synthetic construct
  misc_feature 1..227: note = Description of Artificial Sequence: Synthetic polynucleotide
  source 1..227: mol_type = other DNA
ttagttttttgagtagttggaattataggtgtttgttattatgtttggtttattttttgtatttttagtagagatggggttttattatgttagttaggattgttttgattttttgattttgtgatttgttggttttggttttttaaagtgttgggattataggtgtgagttattatgtttagttttagaaattgaaatgtatattattaagtgaaagaagttaattt

SEQ ID NO: 14894 - DNA, 201 bp, synthetic construct
  misc_feature 1..201: note = Description of Artificial Sequence: Synthetic polynucleotide
  source 1..201: mol_type = other DNA
tttttttttagttttgttgttattttgtagtttgattttagattgttgtgttagtaattagtgagattttgagttaggtgtgggatataattttgtggtgtgttgttttttaagttggttggaaaagtgtaatatttgggtgggagtgatttgattttttaggtgtgtttgttatttttttttttgatttggaaagggaat

SEQ ID NO: 14895 - DNA, 201 bp, synthetic construct
  misc_feature 1..201: note = Description of Artificial Sequence: Synthetic polynucleotide
  source 1..201: mol_type = other DNA
aggtgtgtttgttatttttttttttgatttggaaagggaattttttgattttttgtgttttttaagtgaggtaatgtttttttttgttttggtttgtgtatggtgtatgtttttattgatttgtgtttattgtttggtttttttaagtgagatgaatttggtattttagatggaaatgtagaaattatttgttttttgtgt

SEQ ID NO: 14896 - DNA, 201 bp, synthetic construct
  misc_feature 1..201: note = Description of Artificial Sequence: Synthetic polynucleotide
  source 1..201: mol_type = other DNA
tgtttttttgttttagtgtttatattgtaaaaaagtgttttttttattgggtgtggtggtttatgtttgtaattttagtattttgggaggtagaggtgggtggattatgaggttaggagattgaaattattttggttaatatggtgaaattttgtttgtattgtgaatataaaaaattagttgggtgtggtggtgggtgtt

SEQ ID NO: 14897 - DNA, 201 bp, synthetic construct
  misc_feature 1..201: note = Description of Artificial Sequence: Synthetic polynucleotide
  source 1..201: mol_type = other DNA
gttgggtgtggtggtgggtatttgtagttttagttatttgggaggttgaggtaggagaatggggtgaatttgggaggtggagtttgtagtgagttgagattgtgttattgtattttagtttgggtgatagagtgagattttattttaaaaaaaaataatattaggattgaagtttgttttttaatttttagtgatatggtt

SEQ ID NO: 14898 - DNA, 201 bp, synthetic construct
  misc_feature 1..201: note = Description of Artificial Sequence: Synthetic polynucleotide
  source 1..201: mol_type = other DNA
tgaataagaaagggttattatattttattttgaaatggtttttggagaaagaatggaagtaaattgtataagtgggtgtttatttttttttatttggttatggttattgtggtgtttggttaggtttttggtgatgtgaggtaaatttttttgttggtaaattagtttatatattttttttattgtagatggttatttaga

SEQ ID NO: 14899 - DNA, 201 bp, synthetic construct
  misc_feature 1..201: note = Description of Artificial Sequence: Synthetic polynucleotide
  source 1..201: mol_type = other DNA
ttaagtatttttttgtgatttgtttagaggaatttttggtagtggggatggtgttatttttatttgagagatgaggagattgaggtttagaggggggatgtggtttgtttgagttatattgattgagaggggtagatttggatttgtttgtagtttaagtttttagagattttggtgtggtttgttgggtagttagtttgt

SEQ ID NO: 14900 - DNA, 201 bp, synthetic construct
  misc_feature 1..201: note = Description of Artificial Sequence: Synthetic polynucleotide
  source 1..201: mol_type = other DNA
gtgtgattttggaggggtaagaattattttggtagttatgggggagtttatgagtgtttgataagaggttatgtttttttgggattttttagaaagttagtggaggggttggggatagtagttgttttgggtttaaggtgagtagtattgttgtttttgaggatggtgtgtaggtgaaggtattgttgattttaggttggg

SEQ ID NO: 14901 - DNA, 201 bp, synthetic construct
  misc_feature 1..201: note = Description of Artificial Sequence: Synthetic polynucleotide
  source 1..201: mol_type = other DNA
tttggatatttaggttatttttgaattttaaggtttttaattgtagttatatgtatagaggtttttttgttatgtggggtaatatggttatagggtaagatggttatgggttttagatatttttgggttattattttgtttattgtaggtggatatagttatggaatggaagtaatttttttgattatttatggtagtttt

SEQ ID NO: 14902 - DNA, 201 bp, synthetic construct
  misc_feature 1..201: note = Description of Artificial Sequence: Synthetic polynucleotide
  source 1..201: mol_type = other DNA
gatttttttgagtttgttgggagatagttatgttaatggttataatgggtatagtgtttaggaatgtagtaatttagttagttgttagttttttttttggtgtgggtattatttaatgtgtttatttggggtttagatgtgataaattggttgagggattttgggttttggttgggatgagtgtagtaaatttgttgttat

SEQ ID NO: 14903 - DNA, 201 bp, synthetic construct
  misc_feature 1..201: note = Description of Artificial Sequence: Synthetic polynucleotide
  source 1..201: mol_type = other DNA
ttttgaatagtagtaggtagtagagttttagggagagtaggtttttgtggtgtagtattatggttttgtgttttattttggagaagttgatggagatgtgtgttttggggatgggttttaggattagtttttttgtggtttggttgttgtttgggagtggttgttggtggatggtgtagtgtagaggtaggatgttggggg

SEQ ID NO: 14904 - DNA, 201 bp, synthetic construct
  misc_feature 1..201: note = Description of Artificial Sequence: Synthetic polynucleotide
  source 1..201: mol_type = other DNA
atagggttttattttgttagttaggatggttttgattttttgattttgtgatttgttagttttggttttttaaagtgttgggattataggtgtgagttattgtattgggttggtagttattttttttaagtagtagttttattttttagtataaattaatgttgtagtttttaaattatttgttgaagtgtttttgaattt

SEQ ID NO: 14905 - DNA, 201 bp, synthetic construct
  misc_feature 1..201: note = Description of Artificial Sequence: Synthetic polynucleotide
  source 1..201: mol_type = other DNA
ttttttttttttttttgagatagaattttgttttgttgtttaggttggagtatagtggtgtgatattagtttattgtaaattttattttttgggtttaagtgatttttttgttttagttttttgagtatttgggattatagggagtgtttttatatttggttaattttttgtatttttagtagagatagggttttattgtg

SEQ ID NO: 14906 - DNA, 201 bp, synthetic construct
  misc_feature 1..201: note = Description of Artificial Sequence: Synthetic polynucleotide
  source 1..201: mol_type = other DNA
aatagttgggtgtggtggtttatatttgtaattttagtattttgggaggttgaggtgggtagattatgaggttaggaaattgagattattttggttagtatggtgaaattttgtttttattaaaaatataaaaaaaattagttgggtgttgtggtggatgtttgtagttttagttatttttaaggttgaggtaggagaatg

SEQ ID NO: 14907 - DNA, 201 bp, synthetic construct
  misc_feature 1..201: note = Description of Artificial Sequence: Synthetic polynucleotide
  source 1..201: mol_type = other DNA
ttgatttggaaagggaattttttgattttttgtgttttttaagtgaggtaatgttttgttttgttttggttggtgtatggtgtgtgtatttattgatttgtgtttattgtttggttttttttagtgagatgaatttggtattttagatggaaatgtagaaattatttgttttttgtattgtttatgttgggagttgtagat

SEQ ID NO: 14908 - DNA, 201 bp, synthetic construct
  misc_feature 1..201: note = Description of Artificial Sequence: Synthetic polynucleotide
  source 1..201: mol_type = other DNA
tttttattttgttttttagatagaattttgttgtgttatttaggttggagtgtagtggtgtgattttggtttattgtaatttttgttttttgggtttatgtgatttttttgttttagttttttaagtagttgggattgtaggtgtgtattattatgtttatattaagtttttgtatttttagtagagatggggttttgtta

SEQ ID NO: 14909 - DNA, 201 bp, synthetic construct
  misc_feature 1..201: note = Description of Artificial Sequence: Synthetic polynucleotide
  source 1..201: mol_type = other DNA
tagtgaaattttgtttttattaaaaatataaaaaattagtttggtgtggtgaagggtatttgtagttgtagttatttaggaggttgaggtaggagaatggtgtgaatttgggaggtggagtttgtagtgaattgagattatgttattgtattttagtttgggtgatagagtgagattttgttttaaagaaatagaagattt

SEQ ID NO: 14910 - DNA, 201 bp, synthetic construct
  misc_feature 1..201: note = Description of Artificial Sequence: Synthetic polynucleotide
  source 1..201: mol_type = other DNA
ttttgtgaaaaataaaaaaaataagttgggtgtggtggtttatgtttgtaattttagtattttgggaggttgaagtaggtagattatgaggttaggagattgagattattttggttaatgtggtgaaattttgtttttattaaaaatataaaatattagttgggtgtagtggtgggtgtttgtagttttagttatttggga

SEQ ID NO: 14911 - DNA, 201 bp, synthetic construct
  misc_feature 1..201: note = Description of Artificial Sequence: Synthetic polynucleotide
  source 1..201: mol_type = other DNA
gagttaaagtgatatgtttgtttgggttttttaaagtgttggaattatagatttgagttattgggtttagtttaattattttttttagtttgagtatgagtgttggaagaaaagtttttatttgtatttattttttttagatatagggtttttttttgttatttaggttggagagtagtggtgtaatttttgtttggttta

SEQ ID NO: 14912 - DNA, 201 bp, synthetic construct
  misc_feature 1..201: note = Description of Artificial Sequence: Synthetic polynucleotide
  source 1..201: mol_type = other DNA
ggagtatgaggtaggagagttatttgaatttgggaggtagaggttgttgtgagttgagattatatttttttattttagtttgagtggtagagtaagattttgttttaaaaaaaaaaaaaaaaagttgggggaaggagagaaaaatagagagtttagtggggtaattttttatttagtttttgttatttgttattgttttag

SEQ ID NO: 14913 - DNA, 201 bp, synthetic construct
  misc_feature 1..201: note = Description of Artificial Sequence: Synthetic polynucleotide
  source 1..201: mol_type = other DNA
atatttggtttttgggatttgtatatttttgttttttttgggtggaaagatggtttttttgattagggtttttttgtgttttagagggtatgtttttttttgtaagtgtgagttgtatattagtgagtatgtgtttttatttttagggatattggttattaggtttggggttagatggtaggatttttgttttttttttta

SEQ ID NO: 14914 - DNA, 201 bp, synthetic construct
  misc_feature 1..201: note = Description of Artificial Sequence: Synthetic polynucleotide
  source 1..201: mol_type = other DNA
ttataggtgtttgttattatgtttggttaattttttgtgttttgtttagtagagatggggttttattgtattagttaggatggttttgatttgttgattttgtgatttgtttgttttggttttttaaagtgttgggattataggtgtgagttattttgtgtttggtttttttatttttatattttaaattagagatgattt

SEQ ID NO: 14915 - DNA, 217 bp, synthetic construct
  misc_feature 1..217: note = Description of Artificial Sequence: Synthetic polynucleotide
  source 1..217: mol_type = other DNA
tataggtgttttttattatgtttggttaattttttgtatttttagtagagatggggttttattgtgttagttaggatggttttgattttttgattgagattgtgtttttttgattgtgtttggttgattttttttttttttttatttgttttttttttttttattattattaaaagtttattgttttatatttttttttttttaattttatttaaaa

SEQ ID NO: 14916 - DNA, 217 bp, synthetic construct
  misc_feature 1..217: note = Description of Artificial Sequence: Synthetic polynucleotide
  source 1..217: mol_type = other DNA
ggtttatagtttttagtttgagtgatgtagaagatgggtgatttttgtatttttatttgaggtattgggtttattttattagggagtgttagatagtgggtgtaggttagtgagtgtgtgtattgtgtgtgagttgaagtagggtgaggtattgttttatttgggaagggtaaggggttagggagtttttttttttagttaaagaaaggggtgatgg

SEQ ID NO: 14917 - DNA, 201 bp, synthetic construct
  misc_feature 1..201: note = Description of Artificial Sequence: Synthetic polynucleotide
  source 1..201: mol_type = other DNA
gtttgttattatgtttggttaaatttttgtatttttagtagagatggggttttattttgttaattaggatggtgttgattttttgattttgtgatttgtttgttttggttttttaaagtgttgggattataggtgtgagttattgtgtttggtttggaaattgttttttatgtagttgatttattttaatttttattagta

SEQ ID NO: 14918 - DNA, 201 bp, synthetic construct
  misc_feature 1..201: note = Description of Artificial Sequence: Synthetic polynucleotide
  source 1..201: mol_type = other DNA
tatatgattttgaataagttttgaattatttatatgtgattttttggttttatatgaggtagaatagtatggtgtggattgggaattttgatgtgggagttgaaagatggggaggttgtgggtatggtttttggagttttgggattgagatatgtaggtattttagatgggtttgttgttataataagtgggaaattttta

SEQ ID NO: 14919 - DNA, 201 bp, synthetic construct
  misc_feature 1..201: note = Description of Artificial Sequence: Synthetic polynucleotide
  source 1..201: mol_type = other DNA
tttagagaagatttggtagtttttttagtttttggtttttgtttttgttttttttttttttgtttttaggttttttttttgtagttttttagttttttattgtgttttgtgtttttggttttttttttttttagtgttttttttatttggtgttgtttggttgtaattttggtttttttggggaagaggtttggattttat

SEQ ID NO: 14920 - DNA, 201 bp, synthetic construct
  misc_feature 1..201: note = Description of Artificial Sequence: Synthetic polynucleotide
  source 1..201: mol_type = other DNA
tgtttttatattggaaaaatttaaatatttttaagagtttgattattggttgggtgtggtggtttaatgtttgtaattttagtattttgggaggttgaggtggttggattataaggttaggagattgtgattattttggttaatatggtgaaattttgattttattaaaaaaatataaaaaaattagttgggtgtggtggc

SEQ ID NO: 14921 - DNA, 201 bp, synthetic construct
  misc_feature 1..201: note = Description of Artificial Sequence: Synthetic polynucleotide
  source 1..201: mol_type = other DNA
gatttggttgtttagaagtgtgtgttattttggattgagttaagatggttgaataggaatagttttggtttatagtttttattgtgagtgatgtagaagatgggtgatttttgtatttttatttgaggtattgggtttattttattagggagtgttagatagtgggtgtaggttagtgggtgtgtgtattgtgtgtgagtt

SEQ ID NO: 14922 - DNA, 201 bp, synthetic construct
  misc_feature 1..201: note = Description of Artificial Sequence: Synthetic polynucleotide
  source 1..201: mol_type = other DNA
ttttggttgggtgttgtggtttatgtttgtaattttagtgagaggtgatagtatgttggtagtttttgtagtttttttttattagtgtgatttttgggtgtgtgtgggttgggttggtttgtatttggagtggttagtagttttgggtagtgaggggtttagtatttgggttagtagttgttgtgtttgattttttgttag

SEQ ID NO: 14923 - DNA, 201 bp, synthetic construct
  misc_feature 1..201: note = Description of Artificial Sequence: Synthetic polynucleotide
  source 1..201: mol_type = other DNA
tgtggttgggtgtggtggtttatttttgtaattttagaattttgggaggttgaggtgggtggattatgagattagtagattgagattattttggttaatatggtgaaattttgtttttattaaaaatatagaaaaagtagttgggtgtggtggtgggtatttgtagttttagttataggttgaggtagaagaatggtgtga

SEQ ID NO: 14924 - DNA, 201 bp, synthetic construct
  misc_feature 1..201: note = Description of Artificial Sequence: Synthetic polynucleotide
  source 1..201: mol_type = other DNA
ttttggttttttaaagtgttggggttataggtgtgagttattgtgtttggttagttgtttttattaaaaatataaaaaattagtttggtgtggtggtgggtgtttgtagttttagttattttggaggttgaggtaggggaattgtttgaatttatgaggtggaggttttaagttgaggttgtgttattgtattttagtttg

SEQ ID NO: 14925 - DNA, 201 bp, synthetic construct
  misc_feature 1..201: note = Description of Artificial Sequence: Synthetic polynucleotide
  source 1..201: mol_type = other DNA
ggttggagtgtagtggtgtgattttggtttgttataatttttattttttagtagtttgttttggttttttaaagtgttgagattgtagtttttgtttggttgttattttgtttgagaagtgaggagtgtttttgtttggttgttattttatttaggaagtgaggagtgtttttttttggttgttattttatttgggaagtg

SEQ ID NO: 14926 - DNA, 201 bp, synthetic construct
  misc_feature 1..201: note = Description of Artificial Sequence: Synthetic polynucleotide
  source 1..201: mol_type = other DNA
gttttagttgtttttttgtggggtagggtttgggatttgtagtttgttatgtttgagttttttattttttttgtgggtttttgtgtggtttgagtttttttgatgagtgttattttttgttttatggtatttagttttattgattatttaagggttgaggagtgtgggtgtatagtattgggattggtaggtagttttatt

SEQ ID NO: 14927 - DNA, 286 bp, synthetic construct
  misc_feature 1..286: note = Description of Artificial Sequence: Synthetic polynucleotide
  source 1..286: mol_type = other DNA
gaagatgggtgatttttgtatttttatttgaggtattgggtttattttattagggagtgttagatagtgggtgtaggttagtgggtgtgtgtattgtgtgtgagttgaagtagggtgaggtattgttttatttgggaagtgtaaggggttagagagttttttttttgagttaaataaatgggtgatggatgtatttggaaaattgggttatttttatttgattattgtgttttttagattggtttaaaaaatggtgtattatgagattatattttatatttggttc

SEQ ID NO: 14928 - DNA, 201 bp, synthetic construct
  misc_feature 1..201: note = Description of Artificial Sequence: Synthetic polynucleotide
  source 1..201: mol_type = other DNA
gttttagttgtttttttgtggggtagggtttgggatttgtagtttgttatgtgtgagtttttttttattgttttaggtttttgtgtagtaggagtttttttgatgagtattgttttttgttttatggtatttggttttattgattgtggaatggttgaggagtgtgggtataaggtatgggattggtaggtagttttgttt

SEQ ID NO: 14929 - DNA, 201 bp, synthetic construct
  misc_feature 1..201: note = Description of Artificial Sequence: Synthetic polynucleotide
  source 1..201: mol_type = other DNA
ggagtgtaatggtattattttggtttattgtaatttttgttttttgggtttaggtgatttttttgttttagttttttgagtatttgggattataggtgtgtgtttttatgtttaattaatttttgtatttttagtagagatggagttttattatgttggttaggtttgttttgaatttttgattttgtgatttatttgttt

SEQ ID NO: 14930 - DNA, 201 bp, synthetic construct
  misc_feature 1..201: note = Description of Artificial Sequence: Synthetic polynucleotide
  source 1..201: mol_type = other DNA
tttttgttatttttttttttgatttggaaagggaattttttgattttttgtgttttttgagtgaggtaatgttttgttttgttttggtttgtgtatattgtgtatatttattgatttgtgtttattgtttggtattttttagtgagatgaatttggtattttagatggaaatgtagaaattatttgttttttgtgttgttt

SEQ ID NO: 14931 - DNA, 201 bp, synthetic construct
  misc_feature 1..201: note = Description of Artificial Sequence: Synthetic polynucleotide
  source 1..201: mol_type = other DNA
gatgtagaagatgggtgatttttgtatttttatttgaggtattgggtttattttattagggagtgttagatagtgggtgtaggtttgtgggtgtatgtattgtgtgtgagttgaagtagggtgaggtattgttttattttggaagtgtagggggttagggagtttttttttttagttaaagaaaggggtgatagatggtat

SEQ ID NO: 14932 - DNA, 201 bp, synthetic construct
  misc_feature 1..201: note = Description of Artificial Sequence: Synthetic polynucleotide
  source 1..201: mol_type = other DNA
tttagttaattttttttatatttttaatagagatagggttttattatgttggttaggatagttttgattttttgattttgtgatttgtttgttttggttttgtaaagtgttgggattataggtgtgagttattgtatttggttggaagtatatattttaatagttttatatagtagttgttgttagaatttaaatgaagat

SEQ ID NO: 14933 - DNA, 201 bp, synthetic construct
  misc_feature 1..201: note = Description of Artificial Sequence: Synthetic polynucleotide
  source 1..201: mol_type = other DNA
tagaagatgggtgatttttgtatttttatttgaggtattgggtttattttattagggagtgttagatagtgggtgtaggttagtgtgtgtgtgtattgtgtgtgagttgaagtagggtgaggtattgttttatttgggaagtgtaaggggttagggagttttttttttgagttagggaaaggggtgatggatggtatttgg

SEQ ID NO: 14934 - DNA, 201 bp, synthetic construct
  misc_feature 1..201: note = Description of Artificial Sequence: Synthetic polynucleotide
  source 1..201: mol_type = other DNA
ttggtagggttggttggttgtttttagtgtggggtttgttaagtttatgtttatttggaattttagttggtttgtaagtattatgtatagtttgggtttttgtttatgtttttttatttatatttttttgtaagttgagggagtgggttttggttttggttagtttagaaaggggtttttatagtgtagtggtgggttgaa

SEQ ID NO: 14935 - DNA, 201 bp, synthetic construct
  misc_feature 1..201: note = Description of Artificial Sequence: Synthetic polynucleotide
  source 1..201: mol_type = other DNA
tttgagatttttgtagttttggggtttgagttgaggggttattggtagtgttgtgggagttaggttgtttttttggaagttaggttgtttttgagtagagtggaggttttattgttttttggggggtatggtggtagtttttaggttgtattggggttggatgagttgggggtggagtataaggggttagttttttttttt

SEQ ID NO: 14936 - DNA, 201 bp, synthetic construct
  misc_feature 1..201: note = Description of Artificial Sequence: Synthetic polynucleotide
  source 1..201: mol_type = other DNA
aaattttttgtttgtagggggtgggtggggaggtggaggaggggttgggttaaatgttgggggtgtgatttggggttgtgggtttttgggttttagtttttgggtttgttgagtgggtgagtggggtgttttattttttgtggtttttttttggtttttatagaatatggagaaggtgattttgttgttggtgatgtttat

SEQ ID NO: 14937 - DNA, 201 bp, synthetic construct
  misc_feature 1..201: note = Description of Artificial Sequence: Synthetic polynucleotide
  source 1..201: mol_type = other DNA
gggtgtttgtagttttagttatttgggaggttgaggtaggagaatggtatgaatttgggaggtggagtttgtagtgagttgagattgtgttattgtattttggtttgggtgatagagtgagattttgttaaaaaaaaaaaaaaaaagtagttttgtaagattaggtgtttggtagataggtatatttagtaaagttataat

SEQ ID NO: 14938 - DNA, 210 bp, synthetic construct
  misc_feature 1..210: note = Description of Artificial Sequence: Synthetic polynucleotide
  source 1..210: mol_type = other DNA
ttattaaaaatataaaaaaattagtttggtgtggtggtgggtgtttttagttttagttgtttgggaggttgaggtaggagaatggtgtgaatttgggaggtggagtttgtggtgagttgagattttgttatagtattttagtttgggtgatagagtgagattttgttttagaaaaaaaaaaaaaaaaaaaaaagaagtgggaatttagaa

SEQ ID NO: 14939 - DNA, 201 bp, synthetic construct
  misc_feature 1..201: note = Description of Artificial Sequence: Synthetic polynucleotide
  source 1..201: mol_type = other DNA
ttttgggtttatgttatttttttgttttagttttttgagtagttgggattataggtatttggttaattttttgtattttttatagagatggggtttttattgtgttagttaggatggttttgattttttgattttgtgatttgtttgtttgggttttttaaagtgttgggattataggtgtgagttattgtgtttagtttg

SEQ ID NO: 14940 - DNA, 201 bp, synthetic construct
  misc_feature 1..201: note = Description of Artificial Sequence: Synthetic polynucleotide
  source 1..201: mol_type = other DNA
gattgtttttttgttattgtatttatataatttgttttaaatgggtaatttattaagtatattttgtttttgtttttgttgtaggtttttgttggattgttgtttataagtttttatagtttgtgagtttttttagtttggtttggtttattttgtggtgtttatgtttattttgggttttttttgatttttttttaattt

SEQ ID NO: 14941 - DNA, 201 bp, synthetic construct
  misc_feature 1..201: note = Description of Artificial Sequence: Synthetic polynucleotide
  source 1..201: mol_type = other DNA
gtagtgtagtggtgtaattttggtttattgtaagttttgttttttgggtttatgttatttttttgttttagtttttgggttagttgggattataggtgtttgttattgtgttaggttaattttttgtatttttagtagagatggggttttattatattagttaggatggttttgattttttgattttgtgatttatttgtt

SEQ ID NO: 14942 - DNA, 201 bp, synthetic construct
  misc_feature 1..201: note = Description of Artificial Sequence: Synthetic polynucleotide
  source 1..201: mol_type = other DNA
tttgtgttttttttttttgagttggtgggttatagatgttggaagaaatttttgtatttgtagttggaattgtagtttatggtgttttggtttttttttttgttttgtttttttttggttaaataatatattaaagaggtgaggtaatgattgttggttagtttttattggggaaaaatttattgttaggatggtatgaat

SEQ ID NO: 14943 - DNA, 201 bp, synthetic construct
  misc_feature 1..201: note = Description of Artificial Sequence: Synthetic polynucleotide
  source 1..201: mol_type = other DNA
ggaataaatatttttgttttataaagatttagaatttattggatattgataaaatgtttattagaggttggtgtagtggtttatgtttataattttggtgtggtggtttatatttgtaattttgatgtggtggtttatatatgtaattttagtattttgtaaggttaggtggggggattatttgagtttaggagtttatga

SEQ ID NO: 14944 - DNA, 201 bp, synthetic construct
  misc_feature 1..201: note = Description of Artificial Sequence: Synthetic polynucleotide
  source 1..201: mol_type = other DNA
gtggtgtaattttggtttattgtaagttttgttttttgggtttatgttatttttttgttttaggtttttgagtagttgggattataggtgtatattattatgtttggttaatttttttgtatttttagtaaagatggggttttattatgttagttaggatggttttgattttttgattttgtgatttattagttttagttt

SEQ ID NO: 14945 - DNA, 201 bp, synthetic construct
  misc_feature 1..201: note = Description of Artificial Sequence: Synthetic polynucleotide
  source 1..201: mol_type = other DNA
gtaaattttttgtaaaattttggttttttagattttagttgggtttttttttttaggtttttagtggtagttgtgttttttgtgtgtttatgttggttagtgtaagttatatatggatttagtgtttattgtatttttgttagttttagggttttagtttgttgttttgggagattttagttttggtttaggtattttttt

SEQ ID NO: 14946 - DNA, 201 bp, synthetic construct
  misc_feature 1..201: note = Description of Artificial Sequence: Synthetic polynucleotide
  source 1..201: mol_type = other DNA
ttttaatttttttattaagatggagttttgttttattgtttaggttggagtgtagtggtgtgattatggtttattataatttttgttttttgggtttaagtgatttttttgttttagttttttgagtagttgggattataggtatgtgttattatgtttaggtaattttagtatttttagttgagatggggttttattatg

SEQ ID NO: 14947 - DNA, 201 bp, synthetic construct
  misc_feature 1..201: note = Description of Artificial Sequence: Synthetic polynucleotide
  source 1..201: mol_type = other DNA
ttttgttaggtgtggtggtttatgtttgtaattttagtattttggaatgttgaggtaggtgaattatgaggttaagagattgagattatttttgttaatatggtgaaattttgtttttattaaaaatataaaaaattagttgggtgtgggggtgggtgtttgtagttttagttgtttgggaggttgaggtaggagaattgt

SEQ ID NO: 14948 - DNA, 201 bp, synthetic construct
  misc_feature 1..201: note = Description of Artificial Sequence: Synthetic polynucleotide
  source 1..201: mol_type = other DNA
attattttttttttttttgagatggagttttgttttgttgtttatgttggggtgtagtggtatgattttggtttattgtaagttttgttttttgggtttatgttatttttttgttttaattttttgagtagttgggattataggtatatgttattatatttggttaatttttttgaatttttagtagagaggggttttatt

SEQ ID NO: 14949 - DNA, 201 bp, synthetic construct
  misc_feature 1..201: note = Description of Artificial Sequence: Synthetic polynucleotide
  source 1..201: mol_type = other DNA
tttgtgaatttgggtggtgttttttttttgtattatttagatgtgtttttaggaaggatgtgttgttatgatttgttatggtggttttggggatggttagtggtgggatgatgggtgtgatgtggttttggggatggttagtggtaggatgatgggtgtgatgtatttgtgttatttgggatttaaatttatttatgattt

SEQ ID NO: 14950 - DNA, 201 bp, synthetic construct
  misc_feature 1..201: note = Description of Artificial Sequence: Synthetic polynucleotide
  source 1..201: mol_type = other DNA
attgggttttattgtgttagttaggatggttttgattttttgattttgtgattagtttgttttggttttttaaagtgttggtattataggtgtgagttattgtttttggtaaagtttttttttgatggttttagtttgttggataagttaggaataaggttattggttgtaagggaggaggagtttttgtaggtggtagtg

SEQ ID NO: 14951 - DNA, 201 bp, synthetic construct
  misc_feature 1..201: note = Description of Artificial Sequence: Synthetic polynucleotide
  source 1..201: mol_type = other DNA
ggtgatttaaattgtttatgtggaatatatatatatatatatatatatatatatatgtgttttagggatggatatatataaatatgtgttttaggggttttgtgtgaggagaggagatttatattattgatttagtaattagggttgattttagagggttggagtatatattttgggttgatgataggtgtttggttttgg

SEQ ID NO: 14952 - DNA, 201 bp, synthetic construct
  misc_feature 1..201: note = Description of Artificial Sequence: Synthetic polynucleotide
  source 1..201: mol_type = other DNA
ttttggtttgtttttttttattttaggttgttttaatttttttttgaaagtttggtgtttattttttattttttgggaaatattttgttgttttggggtgtgttttgtgaaggagatatgttgggtgaaagttagggattttataattattttttgtttttattttgggtttagtgtaggggttgttgtgaaggtattggt

SEQ ID NO: 14953 - DNA, 201 bp, synthetic construct
  misc_feature 1..201: note = Description of Artificial Sequence: Synthetic polynucleotide
  source 1..201: mol_type = other DNA
aggttgttgggaaggaattggtttttatggaagtgttttagtttttttgtttttttggttttttttttttggttgttttagtgttttattgaaagtttggtgttatatttttattttttgggaaattttatgtttttttggggtgttttttgtggggaagatatgtattttgggtgaaagttagggattttatgaatattt

SEQ ID NO: 14954 - DNA, 201 bp, synthetic construct
  misc_feature 1..201: note = Description of Artificial Sequence: Synthetic polynucleotide
  source 1..201: mol_type = other DNA
attaatttaaatatttattaatgatagattggataaagaaaatgtggtggggtggagttaagatggttgaataggaatagttttggtttatagtttttagtgtgagtgatgtagaagatgggtgatttttgtatttttaattgaggtaatgggtttattttattggggagtgttggatagttggtgtaggatagtgggtgt

SEQ ID NO: 14955 - DNA, 201 bp, synthetic construct
  misc_feature 1..201: note = Description of Artificial Sequence: Synthetic polynucleotide
  source 1..201: mol_type = other DNA
gtttgttattatatttggttaattttttgtatttttaatagagatggggttttattgtgttagtaaggatggttttgattttttggttttgtgatttgtttgtgttggttttttgaagtgttgggattataggtatgagttattgtgtttggttagaagtgtttttatttgtttgggaagttgtttttttttggtatttgt

SEQ ID NO: 14956 - DNA, 201 bp, synthetic construct
  misc_feature 1..201: note = Description of Artificial Sequence: Synthetic polynucleotide
  source 1..201: mol_type = other DNA
ttttttattttaaggaataagtttttaattagattagatatagttataagtaaatataaattatgtttttatgtaattttaagagttattttaggttgggtgtggtggtttatgtttgtaattatagtatttttggaggttgtggtgggtggattatgaggttaggagattgagattattttggttaatatggtgaaatta

SEQ ID NO: 14957 - DNA, 201 bp, synthetic construct
  misc_feature 1..201: note = Description of Artificial Sequence: Synthetic polynucleotide
  source 1..201: mol_type = other DNA
ggttaattaggggtatgtttttttatgtatatggtgggtatttttattttagttggttggtagtggtattgtatatggtattttatatttgtattttttttgttttggtttagtgtggttagggatgggttttgttagtttgtagtgttatttgttttgtgtaaggtttagaattgtttatttatgtaagttgggagtttg

SEQ ID NO: 14958 - DNA, 366 bp, synthetic construct
  misc_feature 1..366: note = Description of Artificial Sequence: Synthetic polynucleotide
  source 1..366: mol_type = other DNA
tgagtgatgtagaagatgggtgatttttgtatttttatttgaggtattgggtttattttattagggagtgttaggtagtgggtgtaggttagtgggtgtgtgtattgtgggtgagttgaagtagggtgaggtattgttttatttgggaagtgttaggggttagggagttttttttttgagttaaggaaaggggtgattgatgtatttagaaaattgggttatttttatttgaatattgtgttttttagattggtttaaaaaatggtgtattatgagattatattttatatttggtttggagggttttatgtttatggaattttattgattgttagtatagtagtttgagattaaattgtaaggtgg

SEQ ID NO: 14959 - DNA, 201 bp, synthetic construct
  misc_feature 1..201: note = Description of Artificial Sequence: Synthetic polynucleotide
  source 1..201: mol_type = other DNA
ataaaggttttttaagtttatattagatttatgagtttagttggttttatttagtggattttgtattgggggttgtaggtggagttgtttgttagttttgtgtagtgtttttatagtttttagtttttgggtggttgatgggattgggtgttgtggagtagggggtagtgtttattggggaggtttggttttgtaggagtt

SEQ ID NO: 14960 - DNA, 201 bp, synthetic construct
  misc_feature 1..201: note = Description of Artificial Sequence: Synthetic polynucleotide
  source 1..201: mol_type = other DNA
ggtgttgtttgttatttttttttttgattaggaaagggaattttttgattttttgtgtttttggagtgaggtaatgttttgttttgttttggtttgtgtgtggtgtgttgtatttattgttttgtgtttattgtttggtattttttagtgagatgaatttggtattttatatggaaatgtagaaattatttattttttgtg

SEQ ID NO: 14961 - DNA, 201 bp, synthetic construct
  misc_feature 1..201: note = Description of Artificial Sequence: Synthetic polynucleotide
  source 1..201: mol_type = other DNA
gttgttttgtagtttgattttagattgttgtgttagtaattagtgagattttgtgggtataggattttttgagttaggtgtgggatataatttttaggtgtgttgttttttaagtttgttggaaaagtgtagtattttggttggagtgatttgattttttaggtgttgtttgttatttttttttttgattgggaaagggaa

SEQ ID NO: 14962 - DNA, 384 bp, synthetic construct
  misc_feature 1..384: note = Description of Artificial Sequence: Synthetic polynucleotide
  source 1..384: mol_type = other DNA
ttgaattgttttaattttaagtggtttagttttaagttttgtgagagtattattggttagggtttgtagattgtggttgttaattgttttgatttttagatgttgaatgtttaggattgtgaggtttttgtggaggttttgtgttttgttaaatgttattgtaagtgttgtgttattgagtatattaatttggtttttttttgaagggatagagtttatttggtgttgtatttatataaatttgaataaagtaaatttttttaaaagtagtgtatgtaagtattgatatttatttaaaatagtttttttttttgggaaggttattaggaatttggtttttatttttttttattttttatgggtaatagaggttaaagaaatgaa

SEQ ID NO: 14963 - DNA, 216 bp, synthetic construct
  misc_feature 1..216: note = Description of Artificial Sequence: Synthetic polynucleotide
  source 1..216: mol_type = other DNA
gaagatgggtgatttttgtatttttatttgaggtattgggttaattttattagggagtgttagatagtgggtgtaggttagtgggtgtgtgtattgtgtgtgagttgaagtagggtgaggtattgttttatttgggaagtgtaaggggttagggagttttttttttgagttaaagaaaggggtgatggatgtagttggaaaattgggttattttta

SEQ ID NO: 14964 - DNA, 334 bp, synthetic construct
  misc_feature 1..334: note = Description of Artificial Sequence: Synthetic polynucleotide
  source 1..334: mol_type = other DNA
tgatatagaagatggtgatttttgtatttttatttgaggtattgggtttattttattagggagtgttagatagtgggtataggttagtgggtgtgtgtattgtgtgtgagttgaagtagggtaaggtaatgttttatttgggaagtgttaggggttagggagtttttttttttagttaaagaaaggggtgatggatgtatttggaaaattgggttatttttatttgaatattgtgttttttggattggtttaaaaaatggtgtattatgagattatattttgtatttggtttggagggttttatttgatggagttttgttgattgttagtatag

SEQ ID NO: 14965 - DNA, 201 bp, synthetic construct
  misc_feature 1..201: note = Description of Artificial Sequence: Synthetic polynucleotide
  source 1..201: mol_type = other DNA
gggattttaaggttttgttggtgtggtttaaaggtattggatgttggggttaagatgatttttgtgttgttatgaattaggttattggatgtgggttttgtgttgagtttgtagtttttgaggagttttttgggtttttttgttttgattatatttttttggatggttgttgggtttttgtttgttttgttttgtattgag

SEQ ID NO: 14966 - DNA, 270 bp, synthetic construct
  misc_feature 1..270: note = Description of Artificial Sequence: Synthetic polynucleotide
  source 1..270: mol_type = other DNA
gttattgtattttagtatgggtgatagagttagtttgaaattttgttttgtgtttttttgagaagtgatagtgtattggtatggtagtttttatagtttttgtttgtttttggtgtttttttggttttggtatttattttggttgtgtttgaggagttttttagtttgttgttgtattgtggaagtttatttttgggttggttaaggttggagttggtttttttagtttgtggggaggtgtggagggagaggtatgggtgggaattgggg

SEQ ID NO: 14967 - DNA, 253 bp, synthetic construct
  misc_feature 1..253: note = Description of Artificial Sequence: Synthetic polynucleotide
  source 1..253: mol_type = other DNA
tgtgagtgatgtggaagataggtgatttttgtatttttatttgaggtattgggtttattttattagggagtgttagatagtgggtgtaggttagtgggtgtgtgtattgtgtgtgagttgaagtagggtgaggtattgttttatttgggaagtgtaaggggttagggagttttgtttttgagttaaagaaaggggtgatggatgtatttggaaaattgggttatttttattggaatattgtgtttttttgatc

SEQ ID NO: 14968 - DNA, 204 bp, synthetic construct
  misc_feature 1..204: note = Description of Artificial Sequence: Synthetic polynucleotide
  source 1..204: mol_type = other DNA
ttttagtaggggtggttgggtagaggtgttttttattttttggatggggtggttggttgggtaggggggttgattttttttattttttttttggatggggtggtggtaaagattgagatagttttgttgtttgttgaattttatttttttggttaaaattaagttttttaataaagattttgaagtgttgagtttattaattta

SEQ ID NO: 14969 - DNA, 228 bp, synthetic construct
  misc_feature 1..228: note = Description of Artificial Sequence: Synthetic polynucleotide
  source 1..228: mol_type = other DNA
gttattttgtagtttgattttagattgttgtgttagtaattggtgagattttgtgggtgtaggattttttgagttaggtgtgggatatagttttttgatgtgttggtttttaagtttgtaggaaaagtgtagtatttgggtgggagaggtttgattttttatgtgttgtttgttatttttttttttgattaggaaagggaattttttgattttttgtgttttttgagt

SEQ ID NO: 14970 - DNA, 217 bp, synthetic construct
  misc_feature 1..217: note = Description of Artificial Sequence: Synthetic polynucleotide
  source 1..217: mol_type = other DNA
tgtaggatgtagattgtagatgtttattgttttgtaggtagttttagtttgagtggtggttgtgttgggtttgtgtttggggtttttttttgtatgtttttgttttttagtgtttgtgatgatgtgtgatttattaattatttggatttagtgtatttttatgttaaatagtgtgtgtttatttgtaaagtatatgatagtttttgtggttattggg

SEQ ID NO: 14971 - DNA, 201 bp, synthetic construct
  misc_feature 1..201: note = Description of Artificial Sequence: Synthetic polynucleotide
  source 1..201: mol_type = other DNA
ttatttttgaagttattgagattataagtttattggaaggaattaattttggatatattttgggtgtttgtttgggatattgttatatggtgagtattattggatttgtttgggatattgttatatggtgagtatttttggatttgttttattttttattttgttttatttttttttagaatttaggggttaaatattgga

SEQ ID NO: 14972 - DNA, 204 bp, synthetic construct
  misc_feature 1..204: note = Description of Artificial Sequence: Synthetic polynucleotide
  source 1..204: mol_type = other DNA
aagataataaattggttttaaataaaaagtaagaaaaatgttggggaggagttaagatggttaaataggaatagttttggtttatagtttttagtgtgagtgatgtggaaaatgggtgatttttgtatttttattggaggtattgggtttattttattagggagtgttagatagtgggtataggttagtgggtgtgtgtattgt

SEQ ID NO: 14973 - DNA, 223 bp, synthetic construct
  misc_feature 1..223: note = Description of Artificial Sequence: Synthetic polynucleotide
  source 1..223: mol_type = other DNA
tagtgggtatatagaggtagttgggatttgtttggaagagtttttgtttggggtaaggagttgggattgtgtttaggaggtagtggggagttttggagagtgaagtgttttttgtgtagatttgtgtgtttggagtattggagtttgtagggtaagagagggtttttagaagatttatgatgttttattgggatgtagagggaaatggttatttgtattttta

SEQ ID NO: 14974 - DNA, 201 bp, synthetic construct
  misc_feature 1..201: note = Description of Artificial Sequence: Synthetic polynucleotide
  source 1..201: mol_type = other DNA
tttaaagtattaggattataagtagaattattgtgttttttgtttttttttttgtttttgtttttgttttgttgttgttgttgatgttgttatagagttttgtttttgttgtttaggttgggatgtaatggtgtgattttggtttattgtagtttttgttttttggttttaagtaatttttttgttttagttttgtgagta

SEQ ID NO: 14975 - DNA, 203 bp, synthetic construct
  misc_feature 1..203: note = Description of Artificial Sequence: Synthetic polynucleotide
  source 1..203: mol_type = other DNA
agtataaataaattggttgggtggtagttttagttatttgggaggttgaggtagtagaatagtgtgaatttgggaggtggagtttgtagtgagttgagattgtgttattgtattttagtttgggtgatagagtgagattatgttttaaataaaaaaaaaaaaaaaaaaaaaaagtatttttttagatttagtttgatattagg

SEQ ID NO: 14976 - DNA, 201 bp, synthetic construct
  misc_feature 1..201: note = Description of Artificial Sequence: Synthetic polynucleotide
  source 1..201: mol_type = other DNA
ttatgtttggttaatttttttgtattattagtagagatgaggttttattgaggttttattgtgttagttgggatggtttgggttttttgattttgtgatttgtttaatttggttttttaaattgttgggattataggtatgagatattgtgtttggttgttgtttgattttttttagtagtgttttgtagttttttttgta

SEQ ID NO: 14977 - DNA, 201 bp, synthetic construct
  misc_feature 1..201: note = Description of Artificial Sequence: Synthetic polynucleotide
  source 1..201: mol_type = other DNA
tttttgagtagttgggattataggtgtttgttattttgtttggttaattttttgtatttttagtagagatggggttttattgtgttagttaggatggttttgattttttgattttgtgatttgttagttttggttttttaaagtgttgggattataggtgtgagttattgtgtttggtttaatttaatttttaataatggt

SEQ ID NO: 14978 - DNA, 201 bp, synthetic construct
  misc_feature 1..201: note = Description of Artificial Sequence: Synthetic polynucleotide
  source 1..201: mol_type = other DNA
aaaagttatagggggtgtgaggatagatggtgtgtttttttttatatatatggagatgtaggttggagtaatggtatatggattatgtatatgtggtggatgtattaatgtttatgtagaagagaataaaagttgtttttaattgggtataaattttttgtatttaaatattttgatatttataaataaaattagaataga

SEQ ID NO: 14979 - DNA, 201 bp, synthetic construct
  misc_feature 1..201: note = Description of Artificial Sequence: Synthetic polynucleotide
  source 1..201: mol_type = other DNA
tgatttgttttttttggttttttaaagtgttgggattataggtgtgagttattgtgtttggtttaggttattttttttttttttttttttttttttgaggtggagttttgttttgttgtttaggttggagtgtagtggtgtgattttggtttattgtaagttttgttttttgggtttatatgatttttttgttttagtttt

SEQ ID NO: 14980 - DNA, 201 bp, synthetic construct
  misc_feature 1..201: note = Description of Artificial Sequence: Synthetic polynucleotide
  source 1..201: mol_type = other DNA
ggattataggtgtgagttattgtgtttggtttaaattatggattttttttttttagtggagttttgtttttgtttaggttggaataggatggtatgaatttggtttattgtaatttttattttttgggtttaagtgatttttttgttttagttttttgagtagttgggattataggtatgtgttattatgtttggttagta

SEQ ID NO: 14981 - DNA, 201 bp, synthetic construct
  misc_feature 1..201: note = Description of Artificial Sequence: Synthetic polynucleotide
  source 1..201: mol_type = other DNA
aattttttttttattttttttgtttttttattttataaaattgttattgttattatggtttatttttaatgagttgttgggtatattttttagatggggttgtggttgggtagaggggttttttattttttagtaggggtggttgggtagaagtgttttttattttttggatggggtggttggttgggtggggggttgatt

SEQ ID NO: 14982 - DNA, 201 bp, synthetic construct
  misc_feature 1..201: note = Description of Artificial Sequence: Synthetic polynucleotide
  source 1..201: mol_type = other DNA
gggggttttttaagtttagttttgggtttgggttggggtatagggtagagtgggtttttttagtttttgttatgaggttaaggtagtgtattgtttgtagtgtatatttagaaattaaagtttaggagttggttattattttggtttatagttgatggaagagtaggtgtttttgagaatttatagtgttttttggttagt

SEQ ID NO: 14983 - DNA, 201 bp, synthetic construct
  misc_feature 1..201: note = Description of Artificial Sequence: Synthetic polynucleotide
  source 1..201: mol_type = other DNA
tgggtagtagagtgagattttgttttaaaaaaaaaaaaaaaaagggggggttgggtgtggtggtttatgtttgtaattttagtattttgggagattgaggtgggtagattatgaggttaggagattgggattattttagttaaaatggtgaaattttgtttttattaaaaatataaaaaattagttgggtgtagtggtggg

SEQ ID NO: 14984 - DNA, 201 bp, synthetic construct
  misc_feature 1..201: note = Description of Artificial Sequence: Synthetic polynucleotide
  source 1..201: mol_type = other DNA
gtgggagttatagggttttaggggaggagtgttttaggttgtggtaatagtaggtgtaaaggttttgaggtaggatggggtagggaggtttagagtttattgtgtagagatttgggaggttggtaggtatggtgaggattttgatttaaatttaggaaaggggaattatattggggtatgattttttgtattttttgagat

SEQ ID NO: 14985 - DNA, 201 bp, synthetic construct
  misc_feature 1..201: note = Description of Artificial Sequence: Synthetic polynucleotide
  source 1..201: mol_type = other DNA
gggatttttttatgttggttaggttggttttgaatttttgattttaagtgatttatttgttttggttttttaaagtgatgggattataggtatgagttattgtgtttggttaagggtttttttagatgtaattaagttaagatgaggttatattgagttaggtgggttttaaatttaatggttagtgtttttataagtata

SEQ ID NO: 14986 - DNA, 211 bp, synthetic construct
  misc_feature 1..211: note = Description of Artificial Sequence: Synthetic polynucleotide
  source 1..211: mol_type = other DNA
gttttagggttggaggagtaggagatttgggtagtggggtgggtgagtgttgggaggaggtaagaggttgtgggggaggaagatgttttttttggttttgtggggtaggttgtgtagggtaggttgtgtggggtaggtggggggtgttaaggaagtttgggtgtggttatattgtagagaaagttatgggaggtatgttttgagagttggg

SEQ ID NO: 14987 - DNA, 201 bp, synthetic construct
  misc_feature 1..201: note = Description of Artificial Sequence: Synthetic polynucleotide
  source 1..201: mol_type = other DNA
gtagttaaagttatttttttggttgaaagatattttttttggggggaggagttaagatggttgagtaggaatagttttggtttatagtttttagtgtgagtgataaagaagatgggtgatttttgtatttgtatttgaggtatttggtttattttattagggagtgttagatagtgggtgtaggttagtgggtgtgtgtat

SEQ ID NO: 14988 - DNA, 201 bp, synthetic construct
  misc_feature 1..201: note = Description of Artificial Sequence: Synthetic polynucleotide
  source 1..201: mol_type = other DNA
gtttaggatttgtagtttattatgtttgagttttttatttattttatgggtttttgtgttgtttaagttttttggatgagtgttattttttgttttatggtgtttagttttattgattatttaagggttgaggaatgtgagtatatggtgtaggattggtaggtagttttatttgtagttttggtgtgggatttattaggt

SEQ ID NO: 14989 - DNA, 201 bp, synthetic construct
  misc_feature 1..201: note = Description of Artificial Sequence: Synthetic polynucleotide
  source 1..201: mol_type = other DNA
tggtaatattgtgaagatgtaggttttttatgggaaagattgttgtttggaagtttttatataataggtttttattgagattttaaggttgatagtatggtgggagtttttgggatttttgggtttggtatagtgttattgtagtaggtaggtattgggtggttagaagttgattatttttttaaatggtttgtatatatt

SEQ ID NO: 14990 - DNA, 201 bp, synthetic construct
  misc_feature 1..201: note = Description of Artificial Sequence: Synthetic polynucleotide
  source 1..201: mol_type = other DNA
tttttatgggttgatttggtgattttttatggagaatgtgtaggagttggatattggtattgttaggtggaaaagttttttgttagggtgaaaagttagatggtgtttgttttttgtttttggagtgtttttggtttaatgtagtagttttgtagataaatgttatagaaggtagagtgttttatagatatgaaggagtgg

SEQ ID NO: 14991 - DNA, 201 bp, synthetic construct
  misc_feature 1..201: note = Description of Artificial Sequence: Synthetic polynucleotide
  source 1..201: mol_type = other DNA
gatttttggatttgttgggttgtttttgtatttggttttttttttttaagtttgtggttgggtgtggtttttttaattttagtgttgatttttgtgtttgtgtgttttttttttattttttttatttgtggggttaggggttatatggtattgttgtttgggtttttgagtagggagagttgagtgttgattttgttagaa

SEQ ID NO: 14992 - DNA, 201 bp, synthetic construct
  misc_feature 1..201: note = Description of Artificial Sequence: Synthetic polynucleotide
  source 1..201: mol_type = other DNA
ggatattttataaaatttttgatgagttttttttaaaattattaggttggttgggtgtggtggtttatgtttgtaattttagtattttgggaggttgaggtgggtagattataaggttaggagattgagattattttggttaatatggtgaaattttgtttttattaaataatataaaaaattagttgggtgtggtagtgg

SEQ ID NO: 14993 - DNA, 201 bp, synthetic construct
  misc_feature 1..201: note = Description of Artificial Sequence: Synthetic polynucleotide
  source 1..201: mol_type = other DNA
tttttttttatttttttaggggtttgattttttttttaattgtatttttatagaatggttggttagataggaagttttggttggtgaagtttagtttttgtgggtataggttggtgaattttagagatttgggatttgggtaggttttgtatttgattttttatatggttttgatggagtagtagtagatgtttatttggt

SEQ ID NO: 14994 - DNA, 201 bp, synthetic construct
  misc_feature 1..201: note = Description of Artificial Sequence: Synthetic polynucleotide
  source 1..201: mol_type = other DNA
aaattagttaggtttggtggtaggtatttgtaattttagttattttaggggttgaggtaggagaattgtttgaatttgggaggtggaggttgtagtgagttgagattgtgtttttgtattttagtttgggggataagagtgagattttgttttaaaaaaaaaaaaaaaaaaaaaaaaaggttgggtggtttatatttgtaa

SEQ ID NO: 14995 - DNA, 201 bp, synthetic construct
  misc_feature 1..201: note = Description of Artificial Sequence: Synthetic polynucleotide
  source 1..201: mol_type = other DNA
tattgttatgatttgtgagtgtgtgttttttattttgttagagttggtagtgtgtgttatttatttggtgtttggttattattgttttatgtggatggtgtggttggtttttatgtatgtgtttttggtggttgaggttgatgtggatgtgttgttgtttatttttatgtttttgtgtttttatttgttgggttgggtgat

SEQ ID NO: 14996 - DNA, 201 bp, synthetic construct
  misc_feature 1..201: note = Description of Artificial Sequence: Synthetic polynucleotide
  source 1..201: mol_type = other DNA
tttgtggggtttgtttgtttttttagttgttgttttttgggtggtgtttgttggtgttgatttttataatttattttttttagatagagtttttttttgttgtttaggttggagggaagtggtatgattttagtttattgaaatttattttttttgggtttaagtgatttttatttttgtttttggagtagttgggattat

SEQ ID NO: 14997 - DNA, 201 bp, synthetic construct
  misc_feature 1..201: note = Description of Artificial Sequence: Synthetic polynucleotide
  source 1..201: mol_type = other DNA
ttattttagttttttgagtagttgggattataggtttgtgttattatgtttagtttattttttattttattttatttttatttttattttttttttgagatggagttttgttttgttgtttaggttggagtgtagtggtgggattttggtttattgtaagttttgttttttgggtttatgttatttttttgttttagtttt

SEQ ID NO: 14998 - DNA, 201 bp, synthetic construct
  misc_feature 1..201: note = Description of Artificial Sequence: Synthetic polynucleotide
  source 1..201: mol_type = other DNA
aaatggtgatttagaggttgtttttatttgatgggtttttttagttgaagatgtttagttaatgaattttaagtagatttatggttgggtgtgaagttaatggagtttttattttgtggagatgagtagtataaatttttgtttttaatgtttaatgatatgtaaaatatttaaatttgtaatgtagaattattaagttgt

SEQ ID NO: 14999 - DNA, 201 bp, synthetic construct
  misc_feature 1..201: note = Description of Artificial Sequence: Synthetic polynucleotide
  source 1..201: mol_type = other DNA
ggtaggtggattattttagtttaggagtttgagattagtttgggtaatatggtaaaattttatttttataaaaaatataaaaattagttggttatggtgttgtgtatttgtagttttagttattagggagattgaggtgggagggttatttaagtttgggagaggtgggtgtggtggaggttgtagtgagttaagatgtat

SEQ ID NO: 15000 - DNA, 201 bp, synthetic construct
  misc_feature 1..201: note = Description of Artificial Sequence: Synthetic polynucleotide
  source 1..201: mol_type = other DNA
tagattgatagattttttttttttttgagatggagttttgtattgttatttgggttggagtgtagtggtgtaattttggtttattgtaatttttttaatttgtgtttaagtaatttttttgttttagttttttgagtagttgggattatagggtgtgttattatgtttggttaattttttgtatttttagtagagatgggg

SEQ ID NO: 15001 - DNA, 201 bp, synthetic construct
  misc_feature 1..201: note = Description of Artificial Sequence: Synthetic polynucleotide
  source 1..201: mol_type = other DNA
ttttgggtggtaaggattttatggtgttggtatatgtgttgtgtatgttggtattgggtttgggtattttattgtagtttatggttgtagataagggtattgggtgtggtttagtgggaggattttagtaaggagttggggaaatatgtatgtgtttatttagggttggagtttattgaaggtttatgtgggtagtatgtg

SEQ ID NO: 15002 - DNA, 201 bp, synthetic construct
  misc_feature 1..201: note = Description of Artificial Sequence: Synthetic polynucleotide
  source 1..201: mol_type = other DNA
tggtttattgtaatttttattttttgggtttaagtgatttttttgttttagttttttgagtagttaggattataggtatgtattattatttttggttaattgttgaatttttagtagagatggggttttattatgtttgtaaggttggttttgaatttttgattttaggtgatgtttttatgttggttttttaaagtgtta

SEQ ID NO: 15003 - DNA, 201 bp, synthetic construct
  misc_feature 1..201: note = Description of Artificial Sequence: Synthetic polynucleotide
  source 1..201: mol_type = other DNA
tggttttttaaagtgttgagattataggtgtgagttattgtgtttggtttattttaggtgatttattttttttagttttttaaagtgttgagattataggtgtgagttattatgttgggtttattttaggtgatttattttttttggttttttaaagtgttgagattataggtgtgagttattgtgtttggtttattttag

SEQ ID NO: 15004 - DNA, 201 bp, synthetic construct
  misc_feature 1..201: note = Description of Artificial Sequence: Synthetic polynucleotide
  source 1..201: mol_type = other DNA
gatttgagaattgtttgtattagtttggttttttgtatagtgtttgtgttggtgtatattttagaggggagttgtgttattagatgaattaggattttggtggaggaagggggtgttggtagggtttttatggtatttgttgtttgtggttgaggggagtttggaagggtattagttttatttatttttggttgagatttt

SEQ ID NO: 15005 - DNA, 201 bp, synthetic construct
  misc_feature 1..201: note = Description of Artificial Sequence: Synthetic polynucleotide
  source 1..201: mol_type = other DNA
tttggtatatttagagtatattggggttggggtagatggtggtatttgttttggttggaggagttgggagggttggggaagggatgtgtgattttttttttgataaatttggatgagatgttaagtataatatagaggttggtggtggggtttttttttgtttttggtggattaatttattgtgggattttgggtaatttt

SEQ ID NO: 15006 - DNA, 201 bp, synthetic construct
  misc_feature 1..201: note = Description of Artificial Sequence: Synthetic polynucleotide
  source 1..201: mol_type = other DNA
ttaaaaaatatatatggttgggtgtggtggtttatgtttgtaattttagtattttgggaggttgaggtgggtggattatgaggttaggagattgagattatggtgaaattttgtttttattaaaaaaatataaaaaattagttgggtgtagtggtgggtgtttgtagttttagttgtttgggaggttgaggtaggagaatg

SEQ ID NO: 15007 - DNA, 201 bp, synthetic construct
  misc_feature 1..201: note = Description of Artificial Sequence: Synthetic polynucleotide
  source 1..201: mol_type = other DNA
atggttatatggtagggtttttgttgtttttattgttgttagtttagttgtttgttattttttttagtggtgtttttgttattaatgggttttttataattgatttggtttatgggttgtagatgttgtggattattggtgtggggaagtatgagtttattgatttggggtattttagaggtaagttttgttgttatgtgt

SEQ ID NO: 15008 - DNA, 279 bp, synthetic construct
  misc_feature 1..279: note = Description of Artificial Sequence: Synthetic polynucleotide
  source 1..279: mol_type = other DNA
gggtttgggtttgttaggtgtagaataaggagaaaggggtagaggggaagagttgggttgaattttagtgagggatttggttttttttggaggagaggattgtatttgtgttaggagtatggatttatttagggagtgtttgggtggagaagtagtttttgttttaggttttttgttgtggtatttaaagaggttgggtggtttagaggtttgtaagttatgtttttttttaggttttgtttttgtttggttattttttttgttgttagtttttttatt

SEQ ID NO: 15009 - DNA, 201 bp, synthetic construct
  misc_feature 1..201: note = Description of Artificial Sequence: Synthetic polynucleotide
  source 1..201: mol_type = other DNA
ttggttgttatgaaattataaattatgtttatagaaattttagtttgagaaagaatttagatttttttttttttttttttttttttttgagattgagttttgttttgttgtttaggttggagtgtagtgatgttattttggtttattgtgagttttgttttttgggtttatgttattttttggttttagttttttgtgtag

SEQ ID NO: 15010 - DNA, 201 bp, synthetic construct
  misc_feature 1..201: note = Description of Artificial Sequence: Synthetic polynucleotide
  source 1..201: mol_type = other DNA
ttgggggtggggtggggtggggtggggtggggtgggggggtggggttgaggtaggagaatggtgtgaatttgggaggtggagtttgtagttagttgagattgtgttattgtattttaatttgggtgatagtgattttattttaaaaaataataataataaaaaagaataaagattttataggtattttttttatagtagag

SEQ ID NO: 15011 - DNA, 201 bp, synthetic construct
  misc_feature 1..201: note = Description of Artificial Sequence: Synthetic polynucleotide
  source 1..201: mol_type = other DNA
ggggttttattgtgttagttaggatggttttggttttttgatgttgtgatttttttatttaggttttttaaagtgttgggattataggtgtgagttattgtgtttggtttagttttttatttttaataagtttttaggtgatgtttatgttggtagttttttgagattattatattttaagttttagggtgttagaaaaac

SEQ ID NO: 15012 - DNA, 201 bp, synthetic construct
  misc_feature 1..201: note = Description of Artificial Sequence: Synthetic polynucleotide
  source 1..201: mol_type = other DNA
tgttgttgttgtttttaagttggagttttgttttgttatttaggttgtagtgtagtggtatgattttggtttattataattttggttttttgggttttagtgatttttttgttttagttatttaagtagttgggtttataggtgtatgttattatgtttggttaatttttgtatttttaggagagataggtttttattatg

SEQ ID NO: 15013 - DNA, 201 bp, synthetic construct
  misc_feature 1..201: note = Description of Artificial Sequence: Synthetic polynucleotide
  source 1..201: mol_type = other DNA
aattgagttgtggaatggggttttgtggagtaggttgagtgtgttggttgtggatgggttgtgggtgggattttttagtgtgttattattgaggtatttttgtttttttatgtgtttttgtttttttttttagaagtttaatatttttgagaggatttaaaatatagagtgattagtttttatgtgtattttttggataaa

SEQ ID NO: 15014 - DNA, 201 bp, synthetic construct
  misc_feature 1..201: note = Description of Artificial Sequence: Synthetic polynucleotide
  source 1..201: mol_type = other DNA
aggggagatgaagaaggagggggtagtttgtttaggaggttaggggggtatttgtgtttggtttaggtttattgatgtagatattattgatatttatgtttgtgttgtgttttttgtggtgtttgtggttgttaatgttatttattgggtggtatatgttatgtgagtataggatttaggttatttttgtttgttttggtg

SEQ ID NO: 15015 - DNA, 201 bp, synthetic construct
  misc_feature 1..201: note = Description of Artificial Sequence: Synthetic polynucleotide
  source 1..201: mol_type = other DNA
ttatatattttatgtgttttgtttattatgaggtttgtattttttgggtagtaggtgttgtgtgtttttgggtattttgtaggtggagttgttggtgtagtgtagtattttgtgtttttgatgttggttttggatttagttgttgttgtatttgttattgtttttgggggatatatgtatggagtttatttttaatagggg

SEQ ID NO: 15016 - DNA, 201 bp, synthetic construct
  misc_feature 1..201: note = Description of Artificial Sequence: Synthetic polynucleotide
  source 1..201: mol_type = other DNA
tttattataaatataaaaaattagttgggtgtggtggtgggtatttgtagttttagttatttggaaggttgaggtaggaaaatgatgtgaatttgggaggtggagtttgtagtgagttgagattgtgttgttgtatttaagtttgggtgatagagtgagattttgggttaaaaaaaataaaagaatatagggtatggtatt

SEQ ID NO: 15017 - DNA, 201 bp, synthetic construct
  misc_feature 1..201: note = Description of Artificial Sequence: Synthetic polynucleotide
  source 1..201: mol_type = other DNA
tagagtagttgggattataggtgtttattgttatgtttggtttatttttttttgtatttttagtagagatggggttttattgtgttagttaggatggttttgattttttgatgtgatttatttgttttggttttttaaagtgttgggattataggtgtgagttattgtgtttggtttatttatgtgttttttgggaagggg

SEQ ID NO: 15018 - DNA, 201 bp, synthetic construct
  misc_feature 1..201: note = Description of Artificial Sequence: Synthetic polynucleotide
  source 1..201: mol_type = other DNA
aggtgtttgttattatgtttggttaattttttgtatttttagtagagatggggttttattatgttagttaggatggttttgattttttgattttgtgatttgtttattttgtttttttaaagtgttgggattataggtgtgagttattgtgtttggttgttttttggtatattttttatttttagtatgtggtttttatat

SEQ ID NO: 15019 - DNA, 203 bp, synthetic construct
  misc_feature 1..203: note = Description of Artificial Sequence: Synthetic polynucleotide
  source 1..203: mol_type = other DNA
gttggttatggaaggttatagttttgtagatggtgttggtggagtttggggtagggtattttgagtttgggaaggtttggggtgaaggtttggaggttggtgtgtaggaggttaaagtagtagggaggtttggggagagttaggtggggttgtgttttttatgttgtaggttgtgtttatagatggtgaaagatgttgtggaa

SEQ ID NO: 15020 - DNA, 201 bp, synthetic construct
  misc_feature 1..201: note = Description of Artificial Sequence: Synthetic polynucleotide
  source 1..201: mol_type = other DNA
ttttaagtagttgggattataggtgtttattattatgtttggttaatgtttttgtttttttagtagagatggggttttattgtgttagttaggatggttttgattttttgattttgtgatttttttgttttggttttttaaagtgttgggattatagtaattatttgatggtgtgagttattgtgtttggttatgtatgat

SEQ ID NO: 15021 - DNA, 201 bp, synthetic construct
  misc_feature 1..201: note = Description of Artificial Sequence: Synthetic polynucleotide
  source 1..201: mol_type = other DNA
tttatttttgtgaaaatttttgtgtttgaaaattattgtaaaatatttggaattattattattatttatttttattttttgagatggagttttgttttgttgtttaggttggagtgtagtggtgtgattttggtttattgtaagttttgttttttgggtttatgttatttttttgttttagttttttgagtagttgggatt

SEQ ID NO: 15022 - DNA, 201 bp, synthetic construct
  misc_feature 1..201: note = Description of Artificial Sequence: Synthetic polynucleotide
  source 1..201: mol_type = other DNA
ttggtgagagataaggtatttagggaaagaagaaaaaagtttaggaagggattttagtttgttagatttggggtagaagttttttttggatgagtttttatggagaaatttaaatattaggggttttggaaggttggaagtttttaagttgtttaggaaaagattaaagagatataaattataaaagttttgggattttta

SEQ ID NO: 15023 - DNA, 201 bp, synthetic construct
  misc_feature 1..201: note = Description of Artificial Sequence: Synthetic polynucleotide
  source 1..201: mol_type = other DNA
gttattgattttgagtttttgtttttttatttataaaattgagattagggttgggtatggtggtttatttttgtaattttaatattttgggaggttgaggtgggtggattatgaggtgaggagtttgagattagtttgattaatatggtgaaattttgtttttattaaaaatataaaaattagttgggtgtggtggtgtgt

SEQ ID NO: 15024 - DNA, 201 bp, synthetic construct
  misc_feature 1..201: note = Description of Artificial Sequence: Synthetic polynucleotide
  source 1..201: mol_type = other DNA
gtatgtttattgtagaattatttataatagtaaagatatggatagattggattaagaaaatgtggtgtatatatatatatgttatggaatattatgtagttgtaaaaagaataaaatttggttttttgtagtaatatggatgtagttggaggttattatttggagtgaattaatataggaatagaaaattaaatattgttt

SEQ ID NO: 15025 - DNA, 201 bp, synthetic construct
  misc_feature 1..201: note = Description of Artificial Sequence: Synthetic polynucleotide
  source 1..201: mol_type = other DNA
ttttagttttgtgattggttttttgttttgtgttgatatttagtattttttttggtttttgttttgaggggaaaataaaataggggtttttaggttttattgttggtttattttattgtagtaaattgattgagggttttttgttgtgtttttgtggtttgttgttttatttagtggttttgatatttggtatttatttaa

SEQ ID NO: 15026 - DNA, 201 bp, synthetic construct
  misc_feature 1..201: note = Description of Artificial Sequence: Synthetic polynucleotide
  source 1..201: mol_type = other DNA
gtgggtggattatgaggttagtagattgagattattttggttaatatggtgaaatttagtttttattaaaaatataaaaaattagttgggtgtggtggtatgtgattgtagttttatttattggggaggttgaggtaggagaattgtttgaatttgggaggtggaagttgtagtgagttgagattgtgttattgtattttc

SEQ ID NO: 15027 - DNA, 201 bp, synthetic construct
  misc_feature 1..201: note = Description of Artificial Sequence: Synthetic polynucleotide
  source 1..201: mol_type = other DNA
ttttattttttagttagttttttgtgtagtgtttagggttttggtagttaggatagagtgagtaaaagaagatggatagtggatagggtgtagtggtttatgtttgtaattttagtgttttgggagagtgaggtgggtagattataaggttaagagattaagattattttggttaatatggtgaaattttgtttttattaa

SEQ ID NO: 15028 - DNA, 201 bp, synthetic construct
  misc_feature 1..201: note = Description of Artificial Sequence: Synthetic polynucleotide
  source 1..201: mol_type = other DNA
aaggtaggtggattatggggttaggagtttgagattagtttggttaatttggtgaaaatttgtttttattaaagatataaaaattagttgagtgttgtggtgtatgtttgtaattttagttattggggaggttgaggtaagagaattatttgtaattgggaggtggaggatgtagttagtgagatggtgttattgtatttt

SEQ ID NO: 15029 - DNA, 201 bp, synthetic construct
  misc_feature 1..201: note = Description of Artificial Sequence: Synthetic polynucleotide
  source 1..201: mol_type = other DNA
atttagggggttgaggtaggagaattgtttgaatttgggaggtggagtttgtagtgagttgagattgagttattgtatattttagtttgggtaataagagtgagatttagttttagaaaaaataaataaataataaaataaaaagtaggttgggtgtgatggtttatatttataatattagtattttgggaggttgaggtg

SEQ ID NO: 15030 - DNA, 3238 bp, synthetic construct
  misc_feature 1..3238: note = Description of Artificial Sequence: Synthetic polynucleotide
  source 1..3238: mol_type = other DNA
tagaatgttaggtgtgaaaggtgatgttgaggtagtatgagggaaaaagtagtaggtagtgattgttatatggatgatagtgtttttttggtagtttttgtgttagatttggggttgttgtggagtttttgatttgaatttagggtgtgtgttgtgtttatggggggatattttaaagtggtaagaatgttttttgggaagggaataggatgttaggtttgaaaggggattttgaagtagtttaggaaaaaattttttatggattatggtgtttttttggtagtttttttgttaggtttgagggggttgttgtgttttaggtttgtatttagggttttatggggggtattttaaagtggtaagtaggtttttaggggaaggggatagtatgttaggtttggagggggatgttgaggtagttttgggaataaagaggggatgttggggttttgttatggataatattgtttttttgatagtatttgtggtgggtttgggagtgttatggagtttttggtttgtatttaaggtgtgtgttttgtttttggggggtattataaagtggtaagaaggttattgggggaagggtatgggatgttagggttgaaagggatagttgaggtagtttggggaaaaatgtggtaggttggggttgttttatggatgatagtgtttttttagtagtttttgtgttaggtttggggtggttgtggagtttttggtttgtattgagggtgtgggttgtatttatgggggtattttaaagtggtaagaaggttgttgggtgaatgttatagaaggttaggttttaatggggatgttgaggtagtatagagagaaaagtggttagttgggttttttttatggatgatagtgtttttttggtagtttttgtgttgggtttggggggattgtggagtttttattttgtatttagggtgtgtgttttgtttatgggaggtattttaaagtggtaagtaggtttttgggggaaggggatagtattttagatttgaagggggattttgaggtagtttgtggaaaaaaatggtgatgttgagttttttttataaatgatagtgtttttttggtagtttttttgttgggttagggtggttttggagtttgtggtttgtatttagggtgtgtgttttgtttaagggggtattttaaagtggtaagtagatttttgggggaagggagagtatgttaggtttgaaggggaggttgaggtggttttggggtaaaagtggtgaagttggggtttttttatggatgatattgtttttttggtagtttttgtagtgggtttagaggtgttgtggagtttttggtttgtttttaggttgtgtgttttgtttatgagtggtattataaagtagtaagaaggtttttaggggaagggtataggattttagggttgaaaggtagagttgaggtagattggtgttattttaaggataatagtgttttgtttggtagtttttgtattgggtttggggtggttgtggagtttttggtttgtatttggggtgtgtgttgtgtttatgatgggtattgtaatgtggtaagaagtttttgagtggaagggaataggatgttgagtttgaaaggggatgttgaggtagtttggggaaaaaatttttattgagaatagtgtttttttggtagtttttgagtgggatttaggtggatggtggagtttttggtttggatttagggtgtttgttttgtttatggggtgtatgtgaaagtggtaatagggtttttgggggaaggggataatatgttaggtttgaagagggatgttgggttagttagaggaaaatagtggttaggttgtggttgttttatagattatagtgtttttttggtagtttttgagtttggtttaggtgggggggtttggagtttttgttttgtaatagagtgtgtgttttgtttaagtgtgtatgtgaaagttgtaagaagggttttgggggaagggaataggatgttaggtttgaaaggggattttgaggtagtttagggaaaaattttttatggaggatagtgattttttgatattttttgtgtttggttttgggggttttggagtttttggtttatatttagggtgtgtgttttgtttatgggtggtattttaaagtagtaagaaagttttggggggggaagaataggatgttagatttgaaaggggatgttgaggtagtttaggaaaaaaaggggtgaggttggggtttttttatggatgatagtgttttttttatagtttttatgttagttttgggagggttgtggagtttttgttttgtatataatgtgtgtgttttgtttatggggggtattttaaagtggtaagaagttttttgtgggaaggtaataggatgttaggtttgaatggggatgtttaggtagtttggagaaaaaagtagtgaggttggggtgattttatgaatgatagtgttttattggtagtttttttgttgggtatgtgggggttgttgattttttggtttgtatttagggtgagtgttttgtttatggtgggtattataaagtagtaagaaggtttttgggggaaagggatagtatgttagttttgaagggggaagttgaggtagttttggggaaaaaaagtggggatgttggggtttttttatggatgatattgtttttttagtagtttttgtagtgggtttgggagtgttttggagtttttgttttgtattttgggtgtgtgttttatttatggggagtattataaagtggtaagaaggttattgggggaagggtataggatgttagggttgaaggggatagtggagatagtttaaggaaaaaagtggtgggatggtgttgttttaaggatggttatttttgtgttgggttagggatggttgtggagtttttggtttgtatttaggttgtgtgttttgtttatagggggtattttaaagtagtatgaaggtttttaggggaagggaagaggatgttaggtttggaaggtgatgttgaggtagtagggggtaaaaagtggtgggttgggtttttttatggatgatagtgtttttttggaagttgttgtgtagggtttggtgtgtttgtggagtttttggtttgtatttagaattgtgtggtgtttatgatgggtattttaaagtggtaagatattttttgttggaagggaataggatgttaggtttgaaaggagaagttgagttagtttggggaaaaa

SEQ ID NO: 15031 - DNA, 201 bp, synthetic construct
  misc_feature 1..201: note = Description of Artificial Sequence: Synthetic polynucleotide
  source 1..201: mol_type = other DNA
ttaaggttattattttaaagtgttttagaaaataatatatagaaggttgggtgtggtggtttatgtttgtaattttagtattttgggaggttgaggggggtggattatgaggttaggagattgagattattttggttaatatggtgaaattttgtttttattaaaaatatatatatataaaattagttgggtgaggtggta

SEQ ID NO: 15032 - DNA, 201 bp, synthetic construct
  misc_feature 1..201: note = Description of Artificial Sequence: Synthetic polynucleotide
  source 1..201: mol_type = other DNA
ttattatttatttattattttgtttgtaatttgggttattatttattagtaatttgatgattaatatgttttattttagtaggtgtgtaaggtgtgggggtggatataaagattgtggtttttggagaggatggttagggggttgtttttgtaagtgttttttaaaataattggttattgtttttgagtgtttgggtgttg

SEQ ID NO: 15033 - DNA, 201 bp, synthetic construct
  misc_feature 1..201: note = Description of Artificial Sequence: Synthetic polynucleotide
  source 1..201: mol_type = other DNA
atggtgattagaaatgtattaaattttgaatgtataaaagagagagttttaatatgaaatagtaattttttgagaatgaagattttgtagtgttggtgtttgttgggttgtgtaggttttggttgttttatgtttgtgtttgtttttattgtgatttttttgtttttggtatgtttagggttaatttttgggtttattgta

SEQ ID NO: 15034 - DNA, 201 bp, synthetic construct
  misc_feature 1..201: note = Description of Artificial Sequence: Synthetic polynucleotide
  source 1..201: mol_type = other DNA
tttggggattattttgtttttttgttttgattttttttttttttttttttttttttttgagatggagttttgttttgttgtttaggttggagtgtagtggtgtgattttggtttattgtaagttttattttttgggtttatattatttttttgttttagttttttgagtagttgggattataagtatttgttattatgttc

SEQ ID NO: 15035 - DNA, 201 bp, synthetic construct
  misc_feature 1..201: note = Description of Artificial Sequence: Synthetic polynucleotide
  source 1..201: mol_type = other DNA
tttttgggatggggggatttttaggtatttttgggttttgagttgggttgttagggttgtttgttttttgttgttttttttgggttgagttttgtttttgtgttttgtagtggagtagttgtttttaaaggtgtatgtgattagggtgtggttgggatagtgggtatttttttgggttttagtgttgtgtgtgttttggtc

SEQ ID NO: 15036 - DNA, 201 bp, synthetic construct
  misc_feature 1..201: note = Description of Artificial Sequence: Synthetic polynucleotide
  source 1..201: mol_type = other DNA
tggtgtttggtatgaaattttttttttttttttgagatagagttttgtttttgtgtttaatttggagtgaagtggtatgattttggtttatggtaatttttgttttgtaggattaagttattattttgatttagttttttgagtagttgggattataggtatttattattatggttggttaatttttgttttttgtttttt

SEQ ID NO: 15037 - DNA, 201 bp, synthetic construct
  misc_feature 1..201: note = Description of Artificial Sequence: Synthetic polynucleotide
  source 1..201: mol_type = other DNA
aagtagttttttaaaattttaaaaagtaagtatagttttaggaaggagggaggttagtgaaattaaatttttgttgataagtttaaagtaattggtaagatgttgggaaattagatattgaaatatttgtttttaatttttaatttgttattatttgaaataaagttattagggatagttgggtgtggtggtttatgtttg

SEQ ID NO: 15038 - DNA, 201 bp, synthetic construct
  misc_feature 1..201: note = Description of Artificial Sequence: Synthetic polynucleotide
  source 1..201: mol_type = other DNA
atttattgaagaagttgaagtgtgaagtgtgaaattgaagaattttgaaatgtattgagtagtgaaaagattatgtatataaaaataggttggttgggtgtggaggtaggtagattatttgaggttaggaggtgtgattttggtttattgtaagttttattttttgtgtttatgttatttttttgttttagtttttggagt

SEQ ID NO: 15039 - DNA, 201 bp, synthetic construct
  misc_feature 1..201: note = Description of Artificial Sequence: Synthetic polynucleotide
  source 1..201: mol_type = other DNA
attttgggaggttaaggtaggtggttgggaggtgtaggttgtagtgagttgagattatgttattgtattttagtttgggtattattgagtattgagtgaatgagattttgtttgtaattttggtattttgggaggttgaggttggtggattatttgtggttaggggttggagattggtttggttaatatagtgaaattttg

SEQ ID NO: 15040 - DNA, 201 bp, synthetic construct
  misc_feature 1..201: note = Description of Artificial Sequence: Synthetic polynucleotide
  source 1..201: mol_type = other DNA
gtggtgtaattttggtttattgtaagttttgttttttaggtttatgttatttttttgttttagttttttgagtagttggtattataggtgttgattattatgtttggttaattttttgtattttttgatagagatggggttttattgtgttatttaggatggttttgatattttgattttgtgatttgtttgttttggttt

SEQ ID NO: 15041 - DNA, 201 bp, synthetic construct
  misc_feature 1..201: note = Description of Artificial Sequence: Synthetic polynucleotide
  source 1..201: mol_type = other DNA
ggtgggygggttaygaggttaggatatygagattattttggttaatayggtgaaatttygtttttattaaaaatatagaaaattagtygggtatgttggygggtatttgtaagttttagttattygggaggttgaggtaggagaatggygtgatttygggaggyggagtttgtagtgagtygagattaygttattgtattt

SEQ ID NO: 15042 - DNA, 208 bp, synthetic construct
  misc_feature 1..208: note = Description of Artificial Sequence: Synthetic polynucleotide
  source 1..208: mol_type = other DNA
tttatttatttatttttgagatagagtttygttttgtygtttaggttggagtgtagtggtgtgatttyggtttattgtaagtttygtttttygggtttaygttattyggttttagtttttygagtagttgggattataggygttygttattaygttyggttaattttttatatttttagtagagatagggttttattatgttagttag

SEQ ID NO: 15043 - DNA, 201 bp, synthetic construct
  misc_feature 1..201: note = Description of Artificial Sequence: Synthetic polynucleotide
  source 1..201: mol_type = other DNA
ttttttttttttttttttttttttttgagayggagtttggttttgttgtttaggttggygtgtagtggtttattgtatttttygtttttygggtttaagygatttttttattttagttttttaagtagttggggttaaaggtttgtgttattatgttyggttaattttttgtattttagtagagayggggttttatygtgt

SEQ ID NO: 15044 - DNA, 201 bp, synthetic construct
  misc_feature 1..201: note = Description of Artificial Sequence: Synthetic polynucleotide
  source 1..201: mol_type = other DNA
tygtggtgtaattttagtttattgtaatttttgtyggtagggtttaagtaatttttttgttttagtttttygagtagttgggattataggtaygtattaygatgttyggttaatttttgtatttttagtagagatggggttttattatgttgattaggttggttttgaatttttgattttaggtgattygtttatttyggt

SEQ ID NO: 15045 - DNA, 201 bp, synthetic construct
  misc_feature 1..201: note = Description of Artificial Sequence: Synthetic polynucleotide
  source 1..201: mol_type = other DNA
gtgggttttaaatattttataagttagagtaattagaatagtatggtattggtataaagataggtatatagtttgttyggtttygtttygttttgtygtygygtttgttagttatgagttttatgtagttaaataaaggtttttttgtggatttttggttgaggttaagaatyggtttttgtttaaatatgatttttagaa

SEQ ID NO: 15046 - DNA, 201 bp, synthetic construct
  misc_feature 1..201: note = Description of Artificial Sequence: Synthetic polynucleotide
  source 1..201: mol_type = other DNA
tattgatttggaagaayggaatgatagttagtgaggtatatttagtaatygagtayggttagtgtyggttttyggttttygagatattgatttaygtagygttaggattyggggattttttaggtgtaaattagaggttaaatagtttgtttggttaatgggttagaatttgtggttgaatagaggttttgttgtggtttt

SEQ ID NO: 15047 - DNA, 201 bp, synthetic construct
  misc_feature 1..201: note = Description of Artificial Sequence: Synthetic polynucleotide
  source 1..201: mol_type = other DNA
ttatttttgggggatgagaggagggatggtgagaggatatttttaaagaatatttggggtyggggaagaattttttatgatttygttttataatttggtygtttattttgtattttgttgtaygttgttyggtttttggttatgttatgtgaatttttggagttattttttttttttttttatttggatggagagggtttt

SEQ ID NO: 15048 - DNA, 201 bp, synthetic construct
  misc_feature 1..201: note = Description of Artificial Sequence: Synthetic polynucleotide
  source 1..201: mol_type = other DNA
tttaatagatatgaaaattgaaggtygggygtagtggtttaagtttgtaattttagtattttgggaggtygaggygggyggattaygaggttaggagatygagattattttggttaatatagtgaaatttygtttttattaaaaatattaaaaattagtygggygtggtggygggygtttgtagttttagttatttgggag

SEQ ID NO: 15049 - DNA, 201 bp, synthetic construct
  misc_feature 1..201: note = Description of Artificial Sequence: Synthetic polynucleotide
  source 1..201: mol_type = other DNA
ttgaatagttgggattataggygtttgttatygygttyggtttattttttgtgtgtttttagtagagayggggttttatygtgttagttaggatggtttygattttttgatttygtgattygttygtttyggttttttaaagtgttgggattataggtttgagttatygygttyggttaaaataattaatttttgtgttaa

SEQ ID NO: 15050 - DNA, 201 bp, synthetic construct
  misc_feature 1..201: note = Description of Artificial Sequence: Synthetic polynucleotide
  source 1..201: mol_type = other DNA
ayggatttttgyggtgagtgttatagtttttaaaggtggygtgttyggagtttgttttttttgatgttyggatgtgttyggagttttttttggtgggttygtggttttgtyggtttaggagtgaatttgtagatttttgyggtgagtgttatagtttataaaggtagtgtggatttatagagtgaatagtagtaagattta

SEQ ID NO: 15051 - DNA, 201 bp, synthetic construct
  misc_feature 1..201: note = Description of Artificial Sequence: Synthetic polynucleotide
  source 1..201: mol_type = other DNA
tattaaaaataaagaaggaggtygggygyggtggtttaygtttgtaattttagtattttgggaggtygaggtgggyggyggattaygaggttaggagatygagattayggtgaaatttygtttttattaaaaatataaaaaattagtygggygyggtggygggygtttgtagttttagttattgggaaggttgaggtagga

SEQ ID NO: 15052 - DNA, 201 bp, synthetic construct
  misc_feature 1..201: note = Description of Artificial Sequence: Synthetic polynucleotide
  source 1..201: mol_type = other DNA
gttaagatagygttattgtattttagtttgggaatagagygagatttygttttaaaaaaaaattattgatatatataaatatttgtgaaattggttgggygyggtggtttaygtttgtaattttagtattttggggggtygaggygggygtattataaggttaggagatygagattattttggttaatayggtgaaatttt

SEQ ID NO: 15053 - DNA, 235 bp, synthetic construct
  misc_feature 1..235: note = Description of Artificial Sequence: Synthetic polynucleotide
  source 1..235: mol_type = other DNA
gtttatagtttttagagagagygaygtagaagatgggtgatttttgtatttttatttgaggtatygggtttattttattagggagtgttagatagtgggygtaggttagtgggtgygygtattttgygtgagtygaagtagggygaggtattgttttatttyggaagtataaggggttagggagtttttttttttagttaaagaaaggggtgatagayggtatttggaaaattgg

SEQ ID NO: 15054 - DNA, 201 bp, synthetic construct
  misc_feature 1..201: note = Description of Artificial Sequence: Synthetic polynucleotide
  source 1..201: mol_type = other DNA
tttygagtagttggygttataggygtttattattaygttyggttaattttttgtatttttagtagagatagggttttattatgttagttaggatggtttygattttttgatttygtgattygttygttttggttttttaaagtgttgggattataggtatgagttatygyggtyggttttaattatgtatttttatttatt

SEQ ID NO: 15055 - DNA, 201 bp, synthetic construct
  misc_feature 1..201: note = Description of Artificial Sequence: Synthetic polynucleotide
  source 1..201: mol_type = other DNA
ttgattatttaggtgygtttgttatttttttttttgattyggaaagggaattttttgtttttttgygttttttaagtgaggtaatgtttygttttgtttyggtttgygtatggtgtaygtatttattgattygygtttattgtttggtattttttagtgagatgaattyggtattttagatggaaatgtagaaattatttg

SEQ ID NO: 15056 - DNA, 201 bp, synthetic construct
  misc_feature 1..201: note = Description of Artificial Sequence: Synthetic polynucleotide
  source 1..201: mol_type = other DNA
tgggtygttgggtgttygggttgtttttttattgtttaggataaattttatttygttttatyggtygatggtttgtyggggagttygygggygagtyggygtttgtaggtgtgtttttttgttgatatgtttttygtgattagtygtttttgtttttttttattgatgygtttttttygttttttagtagtttttgttttt

SEQ ID NO: 15057 - DNA, 201 bp, synthetic construct
  misc_feature 1..201: note = Description of Artificial Sequence: Synthetic polynucleotide
  source 1..201: mol_type = other DNA
tatttggttyggagggttttatgtttatygagttttgttgattgttagtatagtagtttgagattaaattgtaaggtagtagygaggttgggggaggggygttygttattgtttaggttygtttaggtaaataaagtagtygggaagttygaattgggtggagtttattatagtttaaggaggtttgtttgtttttgtagg

SEQ ID NO: 15058 - DNA, 201 bp, synthetic construct
  misc_feature 1..201: note = Description of Artificial Sequence: Synthetic polynucleotide
  source 1..201: mol_type = other DNA
tygttttgtagtttgattttagattgttgtgttagtaattagygagattttgtgggygtaggattttttgagttaggtgtyggatataatttttaggtgygtygttttttaagttygtyggaaaagygtagtattttggtgggagtgattygattttttaggtgttttttgttatttttttttttgattaggaaagggaat

SEQ ID NO: 15059 - DNA, 201 bp, synthetic construct
  misc_feature 1..201: note = Description of Artificial Sequence: Synthetic polynucleotide
  source 1..201: mol_type = other DNA
agygaygtagaagaygggtgatttttgtatttttatttgaggtatygggtttattttattaagggagtgttagatagtgggygtaggttagtgggtgygygtatygtgygygagtygaagtagggygaggtattgttttatttgggaagtataaggggttagggagtttttttttygagttaaagaaaggggtgayggayg

SEQ ID NO: 15060 - DNA, 201 bp, synthetic construct
  misc_feature 1..201: note = Description of Artificial Sequence: Synthetic polynucleotide
  source 1..201: mol_type = other DNA
tattaggatattttggttgtagagaggagttatttatygygagttttttttgagttgttttattatttagtaaagtttttttttattttgtttatttttygtttgtttaygtaygttattgttttygggygttgaatttgttaaatggtggaggtgaaagagttttaatataaatagagttgaaataygttttttgtttgt

SEQ ID NO: 15061 - DNA, 201 bp, synthetic construct
  misc_feature 1..201: note = Description of Artificial Sequence: Synthetic polynucleotide
  source 1..201: mol_type = other DNA
gttggagtgtaatggtatgattttggtttattgtaatatttgtttttygggatttagtaatttttttgttttagtttttygagtagttgagattataggygattattattaygttyggttgatatttgtatttttagtagagayggggttttattatgttggttaggttggtttygaatttttgattttaggtgatttgtt

SEQ ID NO: 15062 - DNA, 201 bp, synthetic construct
  misc_feature 1..201: note = Description of Artificial Sequence: Synthetic polynucleotide
  source 1..201: mol_type = other DNA
tattgttggtattagtatttggaagaggggaatatygtggtttttgaaaatttggagtygttagtaattgaggagttttaaggagtgagaygggggtgtygttttattatttttttatttttgtagtyggtagttttgttagyggtgggggtygggttgaggggtggtggtatattaggggggtggtggtatatattatag

SEQ ID NO: 15063 - DNA, 201 bp, synthetic construct
  misc_feature 1..201: note = Description of Artificial Sequence: Synthetic polynucleotide
  source 1..201: mol_type = other DNA
gtttttyggtattattagtatttgggttttttggagyggaagtggttggtyggggatatgtagtttatagaggtttagatgaaaatttggttttaaaatygttagatgaaataygaayggtaaatgtaggatttatagttgaatagtttttttttggggtttttttaygygttygggttttttatttatygttttttggtt

SEQ ID NO: 15064 - DNA, 207 bp, synthetic construct
  misc_feature 1..207: note = Description of Artificial Sequence: Synthetic polynucleotide
  source 1..207: mol_type = other DNA
attagagtagaggggtttttttattttttgtttagttttttgatttggttttttattttttaggaaatatatttyggttygaggtttatttgttgtygtygtygtyggaggagttggttttgaaygagttggtgaygttgaygtgtttggtaygtggttttagttttaaggatgtgttggttygttggttgtaggggttataggagt

SEQ ID NO: 15065 - DNA, 201 bp, synthetic construct
  misc_feature 1..201: note = Description of Artificial Sequence: Synthetic polynucleotide
  source 1..201: mol_type = other DNA
atattaggggaagaagatataagygttggttatttataggagtattttagtagaaggataygttgataggtattyggaagttagtaggtygtggattagygggaggaggyggaggttggtttgggtagttaggggagagtyggggttgtygagtattttaattttaggggaaaattattttttttttggttgttttatggg

SEQ ID NO: 15066 - DNA, 201 bp, synthetic construct
  misc_feature 1..201: note = Description of Artificial Sequence: Synthetic polynucleotide
  source 1..201: mol_type = other DNA
tygattttttaggtgygttygttatttttttttttgattyggaaagggaattttttgattttttgygttttttaagtgaggtagtgtttygttttgtttygygtayggtgtaygtatttattgatttgygtttattgtttggtattttttagtgagatgaaatyggtattttagatggaaatgtagaaattattygttttt

SEQ ID NO: 15067 - DNA, 201 bp, synthetic construct
  misc_feature 1..201: note = Description of Artificial Sequence: Synthetic polynucleotide
  source 1..201: mol_type = other DNA
ttaygttttaggtatatygatattttygtattggttttttttaggaggttaygttttaggtataygggtatttttatattgattttttttagtaggttaygttttaggtataygggtatttttatattgatttttttygggaggttaygttttaggtataygggtatttttatattggttttttttaggaggttaygtttt

SEQ ID NO: 15068 - DNA, 201 bp, synthetic construct
  misc_feature 1..201: note = Description of Artificial Sequence: Synthetic polynucleotide
  source 1..201: mol_type = other DNA
gtttttttgttyggtygtttagtttgggaagtgaggagygtttttttttggtygttatttygtttaggaagtgaggagygtttttgttyggttatttatygtttgggatgtggggagtatttttgttaggtygygattttatttgggaattgaggagtgtttttgtttygttattattttatttgggaggtgaggagygtt

SEQ ID NO: 15069 - DNA, 201 bp, synthetic construct
  misc_feature 1..201: note = Description of Artificial Sequence: Synthetic polynucleotide
  source 1..201: mol_type = other DNA
gagggagaygyggggygggaattggggttgttygyggtaggttagagtaagttttgggtggatatggttttggygggttttatatttygagtagttggtygttttattagtttygggtagtgaggggtttattattygggatagtagttgtggagggtgygtygagttttttagtagtgttagttygtyggygttgtgttc

SEQ ID NO: 15070 - DNA, 201 bp, synthetic construct
  misc_feature 1..201: note = Description of Artificial Sequence: Synthetic polynucleotide
  source 1..201: mol_type = other DNA
tttgattaaaaataaataaatatggtygggtgyggtggtttaggtttgtaattttagtatttygggaggtygaggyggtggattataaygttaggagatygagattattttggttaatayggtgaaattttatttttattgaaaatataaaaaattagtygggygtggtggtgggtatttgtagttttagttatttaggag

SEQ ID NO: 15071 - DNA, 201 bp, synthetic construct
  misc_feature 1..201: note = Description of Artificial Sequence: Synthetic polynucleotide
  source 1..201: mol_type = other DNA
yggttagggggtatttttagaygtatagaagtttyggaggttatggtaagtttgtaatygggattygtttttaggtttataygtgtagttttttagttgygtaatttttttaaatggagtagttttggygtgggtggggttygggtyggtagtgggggyggggtyggtagtgggggyggggttagttgggggaggaggggg

SEQ ID NO: 15072 - DNA, 201 bp, synthetic construct
  misc_feature 1..201: note = Description of Artificial Sequence: Synthetic polynucleotide
  source 1..201: mol_type = other DNA
tatggygaaattttatttttattaaaaatataaaaattagttgggygtggtagtgtaygtttgtaattttagttatttgggaggttgaggtaggattatygtttgaattyggaaggtggaggttgtagtgaattaagagagyggttttgtattatagtttgaaygatagagtaagattttattttaaaataattaattaat

SEQ ID NO: 15073 - DNA, 201 bp, synthetic construct
  misc_feature 1..201: note = Description of Artificial Sequence: Synthetic polynucleotide
  source 1..201: mol_type = other DNA
attaygttyggttaattttttttttttgtatttttagtagagayggggttttatygtgttagttaggatggtttygattttttgattttataattygttygtttyggttttttaaagtgttgggatgataggtgggagttatygygttyggtttaatttagygttygatatttgaagaygatttgggttagaggagatygt

SEQ ID NO: 15074 - DNA, 201 bp, synthetic construct
  misc_feature 1..201: note = Description of Artificial Sequence: Synthetic polynucleotide
  source 1..201: mol_type = other DNA
agygagtygtygatgttagygagatgttaggttggatttagtaagtygtygatgttagttagaygtagagtagagaaygttggttaaagagtagttaggyggtgtttgttyggtygaagtttagtttyggagaggtaggttttgtattaggaygtggaggtttyggggttatgaaatttttagggtgagagataaaggtag

SEQ ID NO: 15075 - DNA, 380 bp, synthetic construct
  misc_feature 1..380: note = Description of Artificial Sequence: Synthetic polynucleotide
  source 1..380: mol_type = other DNA
tttttttttttttttttagayggagtttagttttgtttttatgttgtagggtagtggygyggtttyggtttattgtaattttygtttttygggttttygygatttttttgttttagtttttygagtagttgggattataggtataygttattaygtttagttaatttttgtttgtttgtttatttatttattattatttttgagayggagtttygttttgttattaggttggagtgttattggagtgtaatggtaygatttyggtttattgtaattttygtttttygggtttaagtaatttttttgttttagtttttygtgtaattgggattataggtaygtgttattatttttagttaattttttgtattttagtagag

SEQ ID NO: 15076 - DNA, 201 bp, synthetic construct
  misc_feature 1..201: note = Description of Artificial Sequence: Synthetic polynucleotide
  source 1..201: mol_type = other DNA
gagtgtaatggygygatttyggtttattgtaagtttygtttttygggtttaygttatttttttgttttagttttttaagtagttgggattagaggtgttygtygttaygtttagttaattttttgtatttttagtagagayggggttttatygtattagttaggatggtttygattttttgatttygtgattygttygttt

SEQ ID NO: 15077 - DNA, 201 bp, synthetic construct
  misc_feature 1..201: note = Description of Artificial Sequence: Synthetic polynucleotide
  source 1..201: mol_type = other DNA
tatagggtgtygaaattaagttatttagggagttygtagattttatttttttyggtgagagagtttggtggggagtattttatttaatgtagggaatagygttattgyggtttttatttttyggttttaagtgatttatttgtygtagttttttaagtagttgggattataggygygtgttattaygtygggttagttttt

SEQ ID NO: 15078 - DNA, 201 bp, synthetic construct
  misc_feature 1..201: note = Description of Artificial Sequence: Synthetic polynucleotide
  source 1..201: mol_type = other DNA
ttttttttttgggggtttttttatgttttatgtagtttatggtgtggggtttattggttttggyggggtggaaggttttatgtygtygtygttttaygtygtyggtggtgggggtttgttgggggttgggaggaaggtaaataggaagggtttatyggggagagggtgggggagtaygttatagtygtygtagttygtygt

SEQ ID NO: 15079 - DNA, 201 bp, synthetic construct
  misc_feature 1..201: note = Description of Artificial Sequence: Synthetic polynucleotide
  source 1..201: mol_type = other DNA
tttaggtgygttygttatttttttgattyggaaagggaattttttgattttttgygttttttaagtgaggtaatgttttattttgtttyggtttaygtayggtgtgygtatttattgatttgtgtttattgtttggtattttttagtgagatgaattyggtattttagatggaaatgtagaaattattygttttttgygtc

SEQ ID NO: 15080 - DNA, 201 bp, synthetic construct
  misc_feature 1..201: note = Description of Artificial Sequence: Synthetic polynucleotide
  source 1..201: mol_type = other DNA
ggttgtagtgtagtggygygattttygtttattgtaagttttttttttygggtttaygttatttttttgttttagtttttgagtagttgagattataggygttygttattatattyggttaattttttgtaaaaaatttaaaaaaaaaattaaagataaaatgggttyggtagtatgatattttttatttttaattatttg

SEQ ID NO: 15081 - DNA, 201 bp, synthetic construct
  misc_feature 1..201: note = Description of Artificial Sequence: Synthetic polynucleotide
  source 1..201: mol_type = other DNA
ttttgttttttttaagygtyggttaggttgagaaataaagggatagagtataaaagagggaaattttaaagtygggtattygggggagatattatatgtyggtaggttttgtgatgtttttgagtygtaaaattagtaagtttttattagggatttttaaaaggggagggagtgtaygaatagggtgtgggttatagagat

SEQ ID NO: 15082 - DNA, 201 bp, synthetic construct
  misc_feature 1..201: note = Description of Artificial Sequence: Synthetic polynucleotide
  source 1..201: mol_type = other DNA
agtagtgtttttataaataggygtgaaaatygagtatgttttgggttggttagttgaattattgygtgtagagagggagttttggtygtataggtatagyggyggattatgtttttatatatgtygtttgtatagaaaatggagaataagtttttttttgggtygggtttttaagattataataataagagttygttaaag

SEQ ID NO: 15083 - DNA, 201 bp, synthetic construct
  misc_feature 1..201: note = Description of Artificial Sequence: Synthetic polynucleotide
  source 1..201: mol_type = other DNA
ttttaggggttttaaatyggagttttatttttaggatttataaaattttagatatagttaggatttgttagggagattagtttttttyggtagtttgggygttgttgtttttaatatatagtgataattyggaatttatttttagagttatttagaaataygttttggagatggtgtttttygaaagatttttatttttaa

SEQ ID NO: 15084 - DNA, 201 bp, synthetic construct
  misc_feature 1..201: note = Description of Artificial Sequence: Synthetic polynucleotide
  source 1..201: mol_type = other DNA
ggatgtttggttatatttgattttttatttttgggtatggaggtttgtttgtagaggttygggttygggtataaagggagagagaggtttttattgtttygtaggggtygaaatgtagatygtgtattttyggtgatttyggggatttttttttgattattaggatttttttggattttagggtttttgttttgtttaggt

SEQ ID NO: 15085 - DNA, 201 bp, synthetic construct
  misc_feature 1..201: note = Description of Artificial Sequence: Synthetic polynucleotide
  source 1..201: mol_type = other DNA
ttagtagagayggggttttatygtgttagttaggatggtttygattttttgatttygtgattygttygtttyggttttttaaagtgttgggattataggygtgagttatygygttyggttatttattttttttaagagatggttgatatgattttaatttttttaaatttttgaagatttgttttgtgatttagtatgtga

SEQ ID NO: 15086 - DNA, 568 bp, synthetic construct
  misc_feature 1..568: note = Description of Artificial Sequence: Synthetic polynucleotide
  source 1..568: mol_type = other DNA
aggtggagttgtttgttagttyggygtygtgtgttygtattttttagtttttgggtagtygatgggattgggygtygtggaataggggttggygttygtyggggaggtttgggttgtataggagygtayggygggggtggaggtttaggtatggagggttgtaggtttygagttttgttyggyggggaggtagttaaggtttagygagaagtygagtatagtagttgttggtttaggtgttaagttttttattgttygggtyggttggtygtttygagtgyggggtttgttaagtttaygtttattyggaattygagttggttygtaagygtagtttgtagttayggttttygtttaygtttttttttttatatttattygtaagttgagggagtyggttttagttttgtttagtttagaaaggggtttttatagtgtagygaygggttgaagggttttttaaaygyggttagagtgggygttaaggtygaggaggtgtygagagggagygagggttgtgagggttgttagtaygttgttattttttatttttgtgtttgtatattaa

SEQ ID NO: 15087 - DNA, 201 bp, synthetic construct
  misc_feature 1..201: note = Description of Artificial Sequence: Synthetic polynucleotide
  source 1..201: mol_type = other DNA
ttttttttttttttttttttttttttttttttgagayggattygtgttttgtygtttaggttggagtgtagyggygygattttygtttattgtaagtttygtttttygggtttaygttatttttttgttttagtttttygagtagttgggattataggtatttattatgatgtttagttaattttttgtatttttagtaga

SEQ ID NO: 15088 - DNA, 201 bp, synthetic construct
  misc_feature 1..201: note = Description of Artificial Sequence: Synthetic polynucleotide
  source 1..201: mol_type = other DNA
attttagagaagtttatgggagttttagggagagttttttttgtgaagggtagggtattttggaatgggtttgtygagttygtttttattyggaatttaygtttgtttataagygttttatatagttttggtttttatttgygtttttttttttatattttttygtaagtagagggagttaatttyggttttggttagttt

SEQ ID NO: 15089 - DNA, 201 bp, synthetic construct
  misc_feature 1..201: note = Description of Artificial Sequence: Synthetic polynucleotide
  source 1..201: mol_type = other DNA
ggataaagaaaatgtggtatatggttgggtayggtggtttaygtttgtaatttyggtattttgagaggttaaggygggtagattaygaggttaggagatygagattattttggttaataygatgaaattttatttgtattaaaaaatataaaaaattagttaggtatggtggygggtgtttgtagttttagttatttggga

SEQ ID NO: 15090 - DNA, 201 bp, synthetic construct
  misc_feature 1..201: note = Description of Artificial Sequence: Synthetic polynucleotide
  source 1..201: mol_type = other DNA
ttgtattttagtttgggggatagagtgagatttygttttaaaaaagaaagaaaaaaatgtttttttttttttgttttttttgatttttattttgttttgygggttttttattaataatygttygtgtttgattygggtgttttttttattataattttttttttaggtgtatgtttttataataaagtttattttatggtt

SEQ ID NO: 15091 - DNA, 201 bp, synthetic construct
  misc_feature 1..201: note = Description of Artificial Sequence: Synthetic polynucleotide
  source 1..201: mol_type = other DNA
ttagttttatttatgygttatttatggataagggtaattattagtagtagtgattatgtgtgttaggtattygtaggttttttttygttttttgaattaygtgttaygtttagtttagggatgataaattgaggtgtaygagtaggtgagaagaygaatagtgtattygggtaaggtygttagtttttttgtgtttttgtg

SEQ ID NO: 15092 - DNA, 201 bp, synthetic construct
  misc_feature 1..201: note = Description of Artificial Sequence: Synthetic polynucleotide
  source 1..201: mol_type = other DNA
ttattattgatatttattttttttttatttatagtattygtatgtaygttaagaatyggattggtaagagygagtttagtaaygagtttattattayggyggaygaggtaggtaygtgggatygggyggaattttgttttagaggagttygggagttaatttttgagggtttagatgtttaaatgtagaagtagatttttg

SEQ ID NO: 15093 - DNA, 201 bp, synthetic construct
  misc_feature 1..201: note = Description of Artificial Sequence: Synthetic polynucleotide
  source 1..201: mol_type = other DNA
gygggaggygygtaagtgatatattgaggggtttaggtagtagtttttataygttgttaggttagagtagtttygggttaygtgggtgtttttagttgtygttgtaggyggaggtaygtyggttttttaaggatgtgatagyggttggatttttatgattattgtttggttattagagggtaagttttagggttagttaag

SEQ ID NO: 15094 - DNA, 201 bp, synthetic construct
  misc_feature 1..201: note = Description of Artificial Sequence: Synthetic polynucleotide
  source 1..201: mol_type = other DNA
gggtyggtttygggtygtttggggtttttgygatttttatatttatttttttygtagggtgyggygttgggttttatggtgggttttatgatttaygggyggygttaattttagtttttggataygaygatgyggygtttgatttygttttttygygaggtttyggttaagttaattaygttggtggatgtygaygtygag

SEQ ID NO: 15095 - DNA, 201 bp, synthetic construct
  misc_feature 1..201: note = Description of Artificial Sequence: Synthetic polynucleotide
  source 1..201: mol_type = other DNA
taatattgtttgtaaatgattgaatyggtttttgatttttttagagaagatygtgtatagatattyggatgattttattagttaggaaattgagyggggygggaygtatttgtagtagtggtyggatagygtgattatgtaggatggayggtttagatggttatgttgtagtttattagtagtaggtttttaaggtgatta

SEQ ID NO: 15096 - DNA, 201 bp, synthetic construct
  misc_feature 1..201: note = Description of Artificial Sequence: Synthetic polynucleotide
  source 1..201: mol_type = other DNA
tyggatagtaaataygygtgggttttttttgtgtyggatagtaaataygygtgggtttttttgtgttaaayggtaaataygygtgggtttttygtgtgtygaatagtaaataygygtgggttttttttgtgttygatagtaaataygygtgggtttttygtgtgtyggatgataaataygtatgggtgttttgtgtgttgg

SEQ ID NO: 15097 - DNA, 201 bp, synthetic construct
  misc_feature 1..201: note = Description of Artificial Sequence: Synthetic polynucleotide
  source 1..201: mol_type = other DNA
gttttattatgttggttaggttggtttttttaatttttgatttygtgatttatttatttyggttttttaaagtgttgggattataggagtgagttattgygttyggttgagatttttatgttattattttatgaagtttttggtataatgtttgatatatagtaggtatttgataagtggagtttttattgttgttttttt

SEQ ID NO: 15098 - DNA, 201 bp, synthetic construct
  misc_feature 1..201: note = Description of Artificial Sequence: Synthetic polynucleotide
  source 1..201: mol_type = other DNA
gagttaggtgtgggatatagtttygtggtgygtygttttttaagttygtyggaaaagygtagtattygggtgggagtgattygattttttaggtgygttygttatttttttttttgattaggaatgggaattttttgatttttygtgtttttygagtgaggtaatgtttygttttgtttyggttygygtayggtgygtgta

SEQ ID NO: 15099 - DNA, 201 bp, synthetic construct
  misc_feature 1..201: note = Description of Artificial Sequence: Synthetic polynucleotide
  source 1..201: mol_type = other DNA
ttttttggagttaattgtgtttttattattttaaatagagtagtygggatygggygttgtgttttaygtttataattttagtattttgygaggtygaggygggtagattaygaggttaggagatygagattattttggttaatatggtgaaaatttgtttttattaaaaatataaaaaatttttygggygtggtggygggc

SEQ ID NO: 15100 - DNA, 201 bp, synthetic construct
  misc_feature 1..201: note = Description of Artificial Sequence: Synthetic polynucleotide
  source 1..201: mol_type = other DNA
tygatagagtgaaatggyggyggyggtygggatgatgttgttgggtttgttataggygggtgggtaggtgttgggttaggygatggaggaggtggtaggyggtaattttttgtttatgttgttgatygtttgygtttttatttttagtttggtttatttgtttygtttygttgtyggttatttggtttagttgatygtagg

SEQ ID NO: 15101 - DNA, 201 bp, synthetic construct
  misc_feature 1..201: note = Description of Artificial Sequence: Synthetic polynucleotide
  source 1..201: mol_type = other DNA
gtgaaattttgtttttattaaaaatattaaaaaaattagtyggygyggtggtaggygtttgtagttttagttattygtaaagttgaggtaggagaatggygtgaattygggaggyggagtttgtagtgagttgagatygygttttygtattttagtttgggtgatagagygagattttgttttaaaaaaaaagtagtttgg

SEQ ID NO: 15102 - DNA, 201 bp, synthetic construct
  misc_feature 1..201: note = Description of Artificial Sequence: Synthetic polynucleotide
  source 1..201: mol_type = other DNA
tttttatttttgtttttgagatggagttttatttttatttaggttggagtgtagtagtatgatttgggtttattgtaatttttgtttttygggtttagtygatttttttgttttagttttttaagtggttggaattataggtatatattattatattyggtaaatttttttttttttttttttgtatttttagtagattgt

SEQ ID NO: 15103 - DNA, 201 bp, synthetic construct
  misc_feature 1..201: note = Description of Artificial Sequence: Synthetic polynucleotide
  source 1..201: mol_type = other DNA
tatggtgaaatttygattttgttaaaaatataaaaattagtygggygtggttgtgagtatttgtaattttagttatttgggaggttgaggtaggagaatygttagaattygggaggtggaggttgtagtgagttaagatggtattattgtattttagtttgggtaatagagtgagattttattttaaaataaaaaaaaata

SEQ ID NO: 15104 - DNA, 201 bp, synthetic construct
  misc_feature 1..201: note = Description of Artificial Sequence: Synthetic polynucleotide
  source 1..201: mol_type = other DNA
atttgttttaaggattggaagaggaaaattaaaaatattatttgaaaggtyggaygyggtggtttatatttgtaattttagtattttgggaggttaaggygggyggattaygaggttaggagttygagattagtttggttaatataatgaaatttygtttttattaaaaatataaaaattagttgggtttggtggtaggta

SEQ ID NO: 15105 - DNA, 201 bp, synthetic construct
  misc_feature 1..201: note = Description of Artificial Sequence: Synthetic polynucleotide
  source 1..201: mol_type = other DNA
tgtagtggtataatttttgtttttgtaatttttttttttyggttttaagygattttygygttttagtttttaagtagttgggattataggttygagtttygttyggttaattttttttatatttttagtagagatggggttttattatgttggttaggttggtttygaatttttgattttaagtgattygtttattttggt

SEQ ID NO: 15106 - DNA, 201 bp, synthetic construct
  misc_feature 1..201: note = Description of Artificial Sequence: Synthetic polynucleotide
  source 1..201: mol_type = other DNA
aataygggtggtttygygtaggaygggggttttagggtygtttgagtyggaggatagttygtagtttttatygtttgtagttgaagtgtgttgtgagatygttgtaggggttygggttatttttgttttgggggattttaaaaagttgagttatatttatgttgaaatttttattgaggataattaygtattatatagatt

SEQ ID NO: 15107 - DNA, 201 bp, synthetic construct
  misc_feature 1..201: note = Description of Artificial Sequence: Synthetic polynucleotide
  source 1..201: mol_type = other DNA
agttttygttgattttagtaygagtygtttatatatatttaaggtyggtagtatagyggtatatgtggtaaaatygagtaggygtggatgggaagggagygtattagtttgygtgtgaaggttatatttaggggyggagggaggggagaaatatttttgtygtatttgtagtgttttattttttttagtaatttaaaaygt

SEQ ID NO: 15108 - DNA, 234 bp, synthetic construct
  misc_feature 1..234: note = Description of Artificial Sequence: Synthetic polynucleotide
  source 1..234: mol_type = other DNA
ttttgttgaygtagtgttygtygtygtttttggatgattttagtggtgaagtggtgtattatgttataggtttgtyggaattttygtttattygtygagyggtagtaaatgaagtygaggtagtggtgtaagygatattggygtyggatagatagagygtttagtttaatgatagyggagatataattatttatttttttgttaaggagaaggggatttatgagtgtagttttt

SEQ ID NO: 15109 - DNA, 201 bp, synthetic construct
  misc_feature 1..201: note = Description of Artificial Sequence: Synthetic polynucleotide
  source 1..201: mol_type = other DNA
tagtttttttatttgtgtagtgggygtaatgtygatgattgttttygggaagttagayggtgtttgggaggygttgagttggggttgatatagagygagygtttygtgaagtatttgggttttgtgatgtttttaagtttatagaygtattaygttatgaggaatatatttgggttggygatgttggagataagggatttt

SEQ ID NO: 15110 - DNA, 201 bp, synthetic construct
  misc_feature 1..201: note = Description of Artificial Sequence: Synthetic polynucleotide
  source 1..201: mol_type = other DNA
tagtgagtatagatygygttattgtattgtagtttgggtgatagaagtgaaaagaaatattgttttaaaaaaaaaataggagggaggagttaagatggtygaataggaatagtttyggtttatagtttttagygtgagygaygtagaagaygggtgatttttgtatttttatttgaggtatygggtttattttattaggga

SEQ ID NO: 15111 - DNA, 201 bp, synthetic construct
  misc_feature 1..201: note = Description of Artificial Sequence: Synthetic polynucleotide
  source 1..201: mol_type = other DNA
gatgaaatttygtttttattaaaaatataaaaatttagtygggygtggtggyggaygtttgtagttttagttatttaggaggttgaggtaggygaatggygtgaattygggaggyggagtttgtagtgagtygagattgygttattgtattttagtttgggygatagagygagattttgttttaaaaataaaataaaatta

SEQ ID NO: 15112 - DNA, 201 bp, synthetic construct
  misc_feature 1..201: note = Description of Artificial Sequence: Synthetic polynucleotide
  source 1..201: mol_type = other DNA
gtgagtgtggggtttagttggttgttttaagtatyggtatataggtaggttttaggtagggtttgtagttggattaggtatgttatttygaagggaatgyggtggtattttaagaggggtgtttagattttgaagtttyggaaggggygattttatttgttaattagtttttttagttttgttattygtagttttagggat

SEQ ID NO: 15113 - DNA, 201 bp, synthetic construct
  misc_feature 1..201: note = Description of Artificial Sequence: Synthetic polynucleotide
  source 1..201: mol_type = other DNA
gtgyggttttttagttagggtagttygaaatttaggaaygttttaaggttattttgtgggaattgtggygttagggtttttgaatatttttttgtttttygagtygagtygttttatttgttttttaaaygggtttygggaggaaggttygygtgtttttttaaggtgaggagttattgatgtaaattttttgtaaggatt

SEQ ID NO: 15114 - DNA, 201 bp, synthetic construct
  misc_feature 1..201: note = Description of Artificial Sequence: Synthetic polynucleotide
  source 1..201: mol_type = other DNA
ggggatttagtttaygtgtgtgggggtygtgygtgttygtttygtttgtttatgtatgttatatatgtgagagtttatagygagggtagtttttataygygatggtttagaggagygagtattttaggttttttagtaygtttttgtgttgattttttgtagtattgtygggagttatgtgagtgtttaygtttgtgtgtg

SEQ ID NO: 15115 - DNA, 201 bp, synthetic construct
  misc_feature 1..201: note = Description of Artificial Sequence: Synthetic polynucleotide
  source 1..201: mol_type = other DNA
tttattygtttttygtttttttttttgttggatttgaggygtygttttygtygygttgttttygygttatgttaygttaygttaygttaygttaygttaygtttttaygttaygtttaygttaygtttttatttttygtttatagggaaaygggtttyggygatgtgagggygtttgtygtgtttggtgtttttatagggg

SEQ ID NO: 15116 - DNA, 201 bp, synthetic construct
  misc_feature 1..201: note = Description of Artificial Sequence: Synthetic polynucleotide
  source 1..201: mol_type = other DNA
agtttttaaagttttaatttttttttttttttttttttttttttttttttttttttgagtyggagttttattttgttgttaggttggagtgtagtggygygattttagtttattgtaatttttgygtttygggtttaagggatttttttgttttagttttttgagtagttgagattgtaggtaygtgttattaygtttagt

SEQ ID NO: 15117 - DNA, 201 bp, synthetic construct
  misc_feature 1..201: note = Description of Artificial Sequence: Synthetic polynucleotide
  source 1..201: mol_type = other DNA
ttgtaggatagttttaaaaaggaaggttattttttttttgtttattatygtagtttgttaattaattagaaggtaggygttgagatagtaataattagtygatagttgyggaggattgtygggatttttatagagttygataagtgggattatagttattattagttattgagaagagtgttttttatttatagagtgtaa

SEQ ID NO: 15118 - DNA, 201 bp, synthetic construct
  misc_feature 1..201: note = Description of Artificial Sequence: Synthetic polynucleotide
  source 1..201: mol_type = other DNA
ttaaatttttagagggtttattgtaagatttttttygggtttgaaagtttaagatgaataatttttttttttttaggtttagttttaaggygtaatttgygttagtagggtgygttagtagggtgygttagtagggtgygttagtagggtgygttagtagggtgygttagtagggtgygttagtagggtgygttagtaggg

SEQ ID NO: 15119 - DNA, 686 bp, synthetic construct
  misc_feature 1..686: note = Description of Artificial Sequence: Synthetic polynucleotide
  source 1..686: mol_type = other DNA
attatgttttagtttttttggtygtttttatttttaaatattygaaaaatagaggygttgggtgygaggyggagagatgtataggtttggtttyggtttygttttttgtttgttttaaagggtaaggttttttygtttygygtttygtttttgttttatttaggtttygttattatgttygggggttttattygggattggtttttgttttgygtagtaaattyggaagtggattaygtggagtaaaggttttatygaggygygtgagttttgttttgttttgtattaagtttgtattttttaggtttttggtatttttgtttttgggaygtggggtttttatagatttggaaatttttgtttgtttttttttatttagagtaaattgagaygtttataagagtttggaagttgtttttttttgggtttgaagtygtttggaggttggtttygttttyggtttttttgttatagggtaatgtatatattttttatygtatagtttttttgtttaaaattttgttgatttattttgttttttgttttttaaagtttttattygtgygttggattttygttttgggygttttttagttttygtyggttttttttggagygtagygtyggggttttagttttggggaggttgggttttttgtttggttttgggagtttgtaggtgttat

SEQ ID NO: 15120 - DNA, 201 bp, synthetic construct
  misc_feature 1..201: note = Description of Artificial Sequence: Synthetic polynucleotide
  source 1..201: mol_type = other DNA
aggttggtagattaygaggttaggagatygagatygttttggttaatatggtgaaatttygtttttattaaaaatataaaaattagtygggygtggyggygtgtttttgttttagttgttggggaggttgaggtaggagaatggygtgaattygggaggyggagtttgtagtgagtygagatygtattattgtattttagt

SEQ ID NO: 15121 - DNA, 201 bp, synthetic construct
  misc_feature 1..201: note = Description of Artificial Sequence: Synthetic polynucleotide
  source 1..201: mol_type = other DNA
tattgtaagtttygtttttygggtttaygtygttttgttgatttygtgattygtttygtttyggttttttaaagtgttgggattataggygtgagttatygygttyggttaatagtttttaatattaattatttagagtgtgtaataatttggaaaagggtttttttttttttttttgtttttagagatagggtttttggt

SEQ ID NO: 15122 - DNA, 201 bp, synthetic construct
  misc_feature 1..201: note = Description of Artificial Sequence: Synthetic polynucleotide
  source 1..201: mol_type = other DNA
tgggagtgattygatttttaaggtgygttygttatttttttttttgatttagaaagggaattttttgattttttgygttttttaagtgaggtagtgtttygttttgtttyggttygtatayggtgtaygtatttattgatttgygtttattgtttggtattttttagtgagatgaattyggtattttagatggaaatgtag

SEQ ID NO: 15123 - DNA, 201 bp, synthetic construct
  misc_feature 1..201: note = Description of Artificial Sequence: Synthetic polynucleotide
  source 1..201: mol_type = other DNA
attttataaaaatgaaaattaaataagtataagaatggttatatttgggggaggagttaatatggtygaataggaatagtttyggtttatagtttttagygtgagygatatagaagatggtgatttttgtatttttaattgaggtatygggtttattttattagggattgttagatagtgggygtaggttagtgggtgygt

SEQ ID NO: 15124 - DNA, 201 bp, synthetic construct
  misc_feature 1..201: note = Description of Artificial Sequence: Synthetic polynucleotide
  source 1..201: mol_type = other DNA
yggggttttattttgttagttaggatggtttygattttttgatttygtggttygtttgtttyggttttttaaagtgttgggattatagatttgaattatygygtygggttagttttgtgggtttttaaygtgtttttttttatttgtaatttagagttagaagaggttagygttgataggtaggtagtagttatatgaaaa

SEQ ID NO: 15125 - DNA, 201 bp, synthetic construct
  misc_feature 1..201: note = Description of Artificial Sequence: Synthetic polynucleotide
  source 1..201: mol_type = other DNA
ttattaaaaatataaaaaattagtygggygtggtggtgggygtttgtaattttagttattygggaggttgaggtagaagaatggtatgaatttaagaggyggagtttgtagtgagtygggatagygttattgtagtttagtttgggygaaagagtgagatttygttttaaaaaaaaaaaaaaaaaaaaaaaaaaaagattt

SEQ ID NO: 15126 - DNA, 201 bp, synthetic construct
  misc_feature 1..201: note = Description of Artificial Sequence: Synthetic polynucleotide
  source 1..201: mol_type = other DNA
ggagggtggtgagggtggggagggggaaggygggaggtygggttyggtgtatgggggtygggtatattttttttgggtatttttaggataggygaggaaygtatyggtygggattttatttaygagtaggagggtaaggtgtagtttgtgattgatgyggtgtaygttattgtttaygttttttatagtatgtattaggyg

SEQ ID NO: 15127 - DNA, 201 bp, synthetic construct
  misc_feature 1..201: note = Description of Artificial Sequence: Synthetic polynucleotide
  source 1..201: mol_type = other DNA
ttatataagtygtagtttgggtagaygttgtatttgtagygggtttttattataggtttattgtagttatygtagattatattggggtgtattatgttgyggggygttttttgagtatayggtgggyggtggtttygtyggtatttttttttttttataggaagggtaaagagagtygttagggtgggattttttaaagtt

SEQ ID NO: 15128 - DNA, 201 bp, synthetic construct
  misc_feature 1..201: note = Description of Artificial Sequence: Synthetic polynucleotide
  source 1..201: mol_type = other DNA
tatggggaaattttgtttttattaaaaatataaaaattagttyggygtggtggtatataattgtaattttagttattygggaggttgaggtaggagaatygttggaattygggaggyggagtttgtagtgagttaagattgygttatgtattttaatttgggygtygtagygagattttgtttttaaataaataaagtgtt

SEQ ID NO: 15129 - DNA, 201 bp, synthetic construct
  misc_feature 1..201: note = Description of Artificial Sequence: Synthetic polynucleotide
  source 1..201: mol_type = other DNA
agtaattaataaagtgaagatatggtttattgaagygtagaaaatatttataagtygggygyggtagtttaygtttgtaattttagtattttgggaggtygagataygyggattataaggttaggagatygagattattttggttaatatagtgaaattttgtttttattataaatagaaaaaattagttgggtatggtgg

SEQ ID NO: 15130 - DNA, 227 bp, synthetic construct
  misc_feature 1..227: note = Description of Artificial Sequence: Synthetic polynucleotide
  source 1..227: mol_type = other DNA
agattggttttttttatttaataatatgtattttaatttttagggttgggygtggtggtttaygtttgtaattttagtattttgggaggtygaggtyggyggattaygaggttaggagattaagaygattttggttaatatggtgaaatttygtttttattaaaaatatagaaaataagtygggygtggtggygggtatttgtagttttagttatttaggaggttga

SEQ ID NO: 15131 - DNA, 201 bp, synthetic construct
  misc_feature 1..201: note = Description of Artificial Sequence: Synthetic polynucleotide
  source 1..201: mol_type = other DNA
gtttttttttygagttaaagaaaggggtgayggaygtatttggaaaatygggttatttttattygaatattgygttttttygatyggtttaaaaaayggygtattaygagattatattttatatttggttyggagtttygttgattgttagtatagtagtttgagattaaattgtaaggtggtagtaaggttgggggaggg

SEQ ID NO: 15132 - DNA, 201 bp, synthetic construct
  misc_feature 1..201: note = Description of Artificial Sequence: Synthetic polynucleotide
  source 1..201: mol_type = other DNA
aygtagaagaygggtgatttttgtatttttatttgaggtatygggtttattttatttgggagagttagatagtgggygtaggttagtgggggtatgtatygtgygygagtygaagtagggagaggtattgttttatttgggaagygtaaggggttagggagtttttttttygagttaaagaaaggggtgatagaygtattt

SEQ ID NO: 15133 - DNA, 201 bp, synthetic construct
  misc_feature 1..201: note = Description of Artificial Sequence: Synthetic polynucleotide
  source 1..201: mol_type = other DNA
ggtattygttattaygttyggttaattttttgtatttatagtatagayggggttttatygtgttagttaggatggtttygattttttgatttygtgattygttygtttttgttttttaaagtgttgggattataggygtgagttatygygttyggtggaaaggatatttttttatagtatgagtattgaaataaaaaggta

SEQ ID NO: 15134 - DNA, 201 bp, synthetic construct
  misc_feature 1..201: note = Description of Artificial Sequence: Synthetic polynucleotide
  source 1..201: mol_type = other DNA
aatygtgttattggaagttaggaagtaaattttaattttagtattgtttttttttgaaatggagtttygttttgttatttaggttggagtgtagtggygygatttyggtttattgtaagtttygtttttygggtttattttatttttttgttttagtttttygagtagttgggattataggtgttygttattaygttyggt

SEQ ID NO: 15135 - DNA, 201 bp, synthetic construct
  misc_feature 1..201: note = Description of Artificial Sequence: Synthetic polynucleotide
  source 1..201: mol_type = other DNA
tttgggtgatygtttgtaatggagggagtgtgtgggttggtttgttagyggagagatttgttttaygttattaggagtttggtygagtattayggtgatygtggtygggtggaaggagatggaygtttatttgtgtaatttgtttttattttttttttaggggttattttagaataaaatgtaatggtttttttttgttta

SEQ ID NO: 15136 - DNA, 201 bp, synthetic construct
  misc_feature 1..201: note = Description of Artificial Sequence: Synthetic polynucleotide
  source 1..201: mol_type = other DNA
ataagttggttgttyggtaggttatattggggtttttaagagtttgggttgtagaygaatttaggtttgttttttttaattagtgtgattygggtaagtygygttttttttttgagttttagtttttttattttttaaatgggggtgaygttatttttattgttaggggtttttttgagygggttataggaaggtgtttag

SEQ ID NO: 15137 - DNA, 201 bp, synthetic construct
  misc_feature 1..201: note = Description of Artificial Sequence: Synthetic polynucleotide
  source 1..201: mol_type = other DNA
tttagtttgggatyggtagtatttttatttgtaygttatttttagggayggtaatattgtttattttgagtttagagtagttattattttyggttttttygttggttttttgggaggttttaggaagaygtgattttttgttaggtattygtgggtttttttatagttgtyggggtggtttttgtttttttaaaattatat

SEQ ID NO: 15138 - DNA, 201 bp, synthetic construct
  misc_feature 1..201: note = Description of Artificial Sequence: Synthetic polynucleotide
  source 1..201: mol_type = other DNA
aaagttatygtaggtaattagaaaagttgtttttattttatggttgtgtttatttgyggtagataggataatggtttaaagatgtttgagattygtgatygttttattttgtgatygtattattttatatggtaaagaagtttttgtaygtgtgattaygattaaggattttgagattyggagatgatttgggtattyggg

SEQ ID NO: 15139 - DNA, 201 bp, synthetic construct
  misc_feature 1..201: note = Description of Artificial Sequence: Synthetic polynucleotide
  source 1..201: mol_type = other DNA
gtggyggtaggtttgttgygttygttttagttagggtttagagtttttyggttagtttatygtatttggattttagatgggygygttgggtggtgttygygttagggaaagagttggyggttggttgagttgttgygtttttgagygttgtgttygttgtgattattggygtggttgtttttyggtaggttygaaggaatc

SEQ ID NO: 15140 - DNA, 201 bp, synthetic construct
  misc_feature 1..201: note = Description of Artificial Sequence: Synthetic polynucleotide
  source 1..201: mol_type = other DNA
ttttygatattttgtttttatattgtattattygtyggtaatygttttyggatagyggttaggtygyggggaggttggttttggagtttattttyggggygtatattttygttaattttttygaggtggggtataggatygtggtgttgtattayggggatttgttttttttggggttttattatttgttgttatttaagg

SEQ ID NO: 15141 - DNA, 201 bp, synthetic construct
  misc_feature 1..201: note = Description of Artificial Sequence: Synthetic polynucleotide
  source 1..201: mol_type = other DNA
gggtttagaggtattttagtaaatggtttaggaattgtagtattaatttatattgagaaatagaattgttatttaagaaagataattgttggtttaatgyggtggtttaygtttgtaattttagtattttgggaggtygaggttggyggattaygaggttaggagatygagattattttggttaatagggtgaaattttgt

SEQ ID NO: 15142 - DNA, 201 bp, synthetic construct
  misc_feature 1..201: note = Description of Artificial Sequence: Synthetic polynucleotide
  source 1..201: mol_type = other DNA
tayggtgaaattttgtttttattaaaaatataaaaaattagttaggtgtggaggtattttttgtaattttagatatttaggaggttgaggtaggaaaatygtttgaattygggaggtggagtttgtagtgagttgatatygtattattgtgttttagtttgggtaatagagtaaaattttgttttaaaaaaaaaaaaaaaa

SEQ ID NO: 15143 - DNA, 201 bp, synthetic construct
  misc_feature 1..201: note = Description of Artificial Sequence: Synthetic polynucleotide
  source 1..201: mol_type = other DNA
tatttttttgttttagttttaggagtagttgggattataggygttygttataaygttyggttaattttttttgtatttttagtggagayggggttttatygtgttagttaggatggtttygattttttgatttygtgatttattygttttagttttttaaagtgttgggattataggtgtgagttatygygtttagttgtt

SEQ ID NO: 15144 - DNA, 201 bp, synthetic construct
  misc_feature 1..201: note = Description of Artificial Sequence: Synthetic polynucleotide
  source 1..201: mol_type = other DNA
gtttatagtttttagygtgagygatgtagaagaygggtgatttttgtatttttatttgaggtatygggtttattttattagggagggttagatagtgggygtaggttagtgggtgygygtatygtgygttagttaaagtagggtaaggtattgttttatttgggaagygtaaggggttagggagtttttttttygagttaa

SEQ ID NO: 15145 - DNA, 201 bp, synthetic construct
  misc_feature 1..201: note = Description of Artificial Sequence: Synthetic polynucleotide
  source 1..201: mol_type = other DNA
tggtaaaattttatttttattaaaaatataaagatttagtatgggtatggtggtgtatatttgtaattttagttgtttgggaggttgaagtagaagaatygygtgaattygggaggtagaagttgtagtgagttaagattaygttattgtattttagtttgggtgatataaygagattttgtttaaaaaataaaataaaaa

SEQ ID NO: 15146 - DNA, 201 bp, synthetic construct
  misc_feature 1..201: note = Description of Artificial Sequence: Synthetic polynucleotide
  source 1..201: mol_type = other DNA
aaattttttatttttttgaggtagagttttattttgtygtttaggttggagtgtagtagygtgatttyggtttattgtaagttttatttttygggtttaygttatttttttgttttagttttttgagtagttgygattataggtgttttttattaygtygggttaattttttgtatttttagtagagayggggttttattg

SEQ ID NO: 15147 - DNA, 201 bp, synthetic construct
  misc_feature 1..201: note = Description of Artificial Sequence: Synthetic polynucleotide
  source 1..201: mol_type = other DNA
tttygagtagttgggattataggygttygttattaygttyggttaatattttgtatttttagtagagayggggttttatygygttagttaggatggtttygattttttgatttygtgatttgtttgtttyggttttttaaagtgttgggattataggygtgagttatygygttyggtttattttttttattttttatagag

SEQ ID NO: 15148 - DNA, 201 bp, synthetic construct
  misc_feature 1..201: note = Description of Artificial Sequence: Synthetic polynucleotide
  source 1..201: mol_type = other DNA
tgagtygagyggagattgygttattgttttttagtttgggtgatagagggagattttgtgtttaaaaaaaatagatgtaggtaggagtttttttttyggygtttatatttagattgaagaaagtaattgggttgggttyggtggtttagatttgtaattttagtattttgggaggtttaggtagaygtattattttagttt

SEQ ID NO: 15149 - DNA, 201 bp, synthetic construct
  misc_feature 1..201: note = Description of Artificial Sequence: Synthetic polynucleotide
  source 1..201: mol_type = other DNA
ttggagtagtggtaggtggtaagggttgggtggggggttgttttattgggttttttattttttttttttttttttaattttttttttttttttttgagayggagttttgttttgttatttaggttggagtaaagaggtatgatttyggtttatagtaatttttgtttttygggtttaagtgatttttttgttttatgtttt

SEQ ID NO: 15150 - DNA, 201 bp, synthetic construct
  misc_feature 1..201: note = Description of Artificial Sequence: Synthetic polynucleotide
  source 1..201: mol_type = other DNA
tgaagggagggaygagagttttattatttaattttaagtttagtggtyggtgtttttggaagtggagatatatgtttattggtgtgygatttatatttaygaaagggaaygtgttttttggaatataggggagttttggttagggaagtygtttttttatttaagagggataaaggtgtgtaaattttagaaattagatat

SEQ ID NO: 15151 - DNA, 201 bp, synthetic construct
  misc_feature 1..201: note = Description of Artificial Sequence: Synthetic polynucleotide
  source 1..201: mol_type = other DNA
aaattatttttgatttgagatataaaaataaagaggtygggygtaaggtggtttaygtttgtaattttagtattttgggaggtygaggygggyggattaygaggttagtagatygagattattttggttaatayggtgaaatttygtttttattaaataaaatataaaaaattagtygggygtggtggygggygtttgtag

SEQ ID NO: 15152 - DNA, 217 bp, synthetic construct
  misc_feature 1..217: note = Description of Artificial Sequence: Synthetic polynucleotide
  source 1..217: mol_type = other DNA
ttttgaatgaaattaggaaggagaaagtatgggataatgggtttttgataatgataaaaagagaaaaaataaatagaaaaaagaggagggtyggtygggygyggttaggaaggygyggttttggttaggagatygagattattttggttaaygyggtgaagtttygtttttattaaaaatataaaaaattagtygggygtggtggggggygtttgta

SEQ ID NO: 15153 - DNA, 217 bp, synthetic construct
  misc_feature 1..217: note = Description of Artificial Sequence: Synthetic polynucleotide
  source 1..217: mol_type = other DNA
tygttatttttttttttgattgggaaagggaattttttgattttttgttttttttaagtgaggtagtgtttygttttgtttyggttygygtayggtgtaygtatttattgatttgygtttattgtttggtattttttagtgagatgaattyggtattttagatggaaatgtagaaattattygttttttgygtygtttaagttgggagttgtagatc

SEQ ID NO: 15154 - DNA, 201 bp, synthetic construct
  misc_feature 1..201: note = Description of Artificial Sequence: Synthetic polynucleotide
  source 1..201: mol_type = other DNA
tgttggtgggagttaaaatggattaattatataaaaaataatttttaggtygggygtagtggtttaygtttgtaatttyggtattttgggaggttaaggygggyggattaygaggttaggaaatygatattattttggttaataaggtgaaattttatttttattaaaaatataaaaatttagtygggygtggtggygggt

SEQ ID NO: 15155 - DNA, 201 bp, synthetic construct
  misc_feature 1..201: note = Description of Artificial Sequence: Synthetic polynucleotide
  source 1..201: mol_type = other DNA
tggagattttttatttattgtggtagtaaattygtttgaggtgtttgtatgttttagtttyggggtttygggggtygtgtttatagtttttttatttttyggtttttaygttagggttttyggtttatatygtgttgttttgttttatatgagatyggaaagttatatgtggataatttaggatttatttagggttatata

SEQ ID NO: 15156 - DNA, 201 bp, synthetic construct
  misc_feature 1..201: note = Description of Artificial Sequence: Synthetic polynucleotide
  source 1..201: mol_type = other DNA
gtagggttygaattttttttttaggagggttagggttgyggtygggygaygttaggtggggaagatattagaagaggagaaaattaggagygtaggaygyggtgggagattgggaggttgtagagaggaggtttgaggataggagggaaggaggyggggatagaggtygagggttggaggggttgtygggttttttttggg

SEQ ID NO: 15157 - DNA, 201 bp, synthetic construct
  misc_feature 1..201: note = Description of Artificial Sequence: Synthetic polynucleotide
  source 1..201: mol_type = other DNA
gttatygygttyggttaatttttttgtatttttttagtagagtyggggttttatygtgttagttaggatggttaygattttttgattttgtgattyggtygtttyggttttttaaagtgttgggattataggygttaagttatygygttyggttgatagttagatttttaaaggtgtttgaatttttttaatgtggaaata

SEQ ID NO: 15158 - DNA, 201 bp, synthetic construct
  misc_feature 1..201: note = Description of Artificial Sequence: Synthetic polynucleotide
  source 1..201: mol_type = other DNA
agtttaygtayggtgygygtatttattgatttgtatttattgtttggtattttttagtgagatgaattyggtattttagatggaaatatagaaattattygttttttgygtygtttatagtgggagttgtagatyggagttgtttttattyggttattttggtttgattyggagtggtataygtttttaaataattaaatt

SEQ ID NO: 15159 - DNA, 201 bp, synthetic construct
  misc_feature 1..201: note = Description of Artificial Sequence: Synthetic polynucleotide
  source 1..201: mol_type = other DNA
ttggygagaagtygagtatagtagttgttggtttaggtgttaagttttttattgttyggggttgttggtygttttaagtgygggttagtttagtttaygygtattyggaagtygygttggtgagggagggttgygagggttgttagtatgttattattttttattgggattataggygtgagttayggygttyggttgaag

SEQ ID NO: 15160 - DNA, 201 bp, synthetic construct
  misc_feature 1..201: note = Description of Artificial Sequence: Synthetic polynucleotide
  source 1..201: mol_type = other DNA
ttaygttatttttttgttttagtttgtagttgggattataggtgttygttattaygttyggttattttttttgtatttttaatagagayggggttttatygtgttagttaggatggttttaatttgttgatttygtgattygttygtttyggttttttaaagttttgggattgtaggagtgagttatygygttyggttgta

SEQ ID NO: 15161 - DNA, 201 bp, synthetic construct
  misc_feature 1..201: note = Description of Artificial Sequence: Synthetic polynucleotide
  source 1..201: mol_type = other DNA
tagattggagtgtagtggtaygatttyggtttagaattttygttttatgggtttaagtaatttttttgttttagttttyggagtagttgggattataggygttygttattaygttaggttaattttttgtatttttagtagggayggttgatygggygyggtggtttaygtttgtaattttagtattttgggaggtygagg

SEQ ID NO: 15162 - DNA, 201 bp, synthetic construct
  misc_feature 1..201: note = Description of Artificial Sequence: Synthetic polynucleotide
  source 1..201: mol_type = other DNA
tattttttagatgggatagyggtygggaagaggygttttttattttttagatgggatggyggttaggtagagaygttttttattttttagayggggtggyggtygggtagaggttgtaatttyggtattttgggaggttaaggtaggttgttgggaggtgaaggttgtagygagtygagattaygttattgtattttagtt

SEQ ID NO: 15163 - DNA, 201 bp, synthetic construct
  misc_feature 1..201: note = Description of Artificial Sequence: Synthetic polynucleotide
  source 1..201: mol_type = other DNA
gatggagttgtttgttagtttyggtattgtgygttygtattttttagtttttgggtggttaatgggattgggtgtygtggagtagggggtggygttygtyggggaggttygggtygtataggagtttayggaaggggtgggaggtttaggtatggygggttgtaggtttygagttttgtttygygggaaggtagttaaggt

SEQ ID NO: 15164 - DNA, 286 bp, synthetic construct
  misc_feature 1..286: note = Description of Artificial Sequence: Synthetic polynucleotide
  source 1..286: mol_type = other DNA
gagttaggtgtgggatatagtttygtggtgtatygttttttaagtyggtttgaaaagygtaataatygggtgggagtgattygattttttaggtgygttygttatttatttatttgattyggaaagggaattttttgattttttgygttttttaggtgaggtaatgtttygttttgtttyggttygygtayggtgygygtatttattggtttgygtttattgtttggtattttttagtgagatgaattyggtattttagatggaaatgtagaaattattygttttt

SEQ ID NO: 15165 - DNA, 201 bp, synthetic construct
  misc_feature 1..201: note = Description of Artificial Sequence: Synthetic polynucleotide
  source 1..201: mol_type = other DNA
aggtaaagttgtttgttagttttatgttttgtgtttaygttttttagtygttttatagtygatgggatygggtgttatggagtagggggyggtgttygtyggggaggtttttgttgtataggagtttagggtagtggggggaggtttatatatggtaggttgtaggttttaagttttgtttygtagggaggtagttgaggt

SEQ ID NO: 15166 - DNA, 201 bp, synthetic construct
  misc_feature 1..201: note = Description of Artificial Sequence: Synthetic polynucleotide
  source 1..201: mol_type = other DNA
aggygggtggattaygaggttaggggttygagaygagtttggttaatatggtgaaatttygtttttattaaaaatataaaaattagttgggygtggaggygygygtttgtaattttagatattygggaggttgaggtaagagaatygtttgaattygggaggyggaggttgtagtgagtygagatggtgttattgtatttt

SEQ ID NO: 15167 - DNA, 201 bp, synthetic construct
  misc_feature 1..201: note = Description of Artificial Sequence: Synthetic polynucleotide
  source 1..201: mol_type = other DNA
gagygaygtagaagaygggtgatttttgtatttttatttgaggtatygggtttattttattagggagtgttagatagtgggygtaggttagtgggtgtgygtaatgtgygygagtygaagtagggygaggtattgttttattygggaagygtaaggggttagggagtttttttttygagttaaaggaaggggtgayggagg

SEQ ID NO: 15168 - DNA, 201 bp, synthetic construct
  misc_feature 1..201: note = Description of Artificial Sequence: Synthetic polynucleotide
  source 1..201: mol_type = other DNA
gtgtygtttgttatttttttttttgattaggaaagggaattttttgattttttgygttttyggagtgaggtaatgtttygttttgttttagttygtatayggtgtatgtatttayggatttgygtttattgtttggtattttttagtgagatgaattyggtattttagatggaaatgtagaaattattygttttttgygtt

SEQ ID NO: 15169 - DNA, 201 bp, synthetic construct
  misc_feature 1..201: note = Description of Artificial Sequence: Synthetic polynucleotide
  source 1..201: mol_type = other DNA
atttttatttgaattttgatagtagttattatgtagagttgttaaaatgtatatttttggtygggtgyggtggtttaygtttgtaattttagtattttgyggggtygaggygggyggattaygaggttaagagattaagattattttggttaatatggtgaaattttgtttttattaaaaatataaaaaaaattagttggg

SEQ ID NO: 15170 - DNA, 201 bp, synthetic construct
  misc_feature 1..201: note = Description of Artificial Sequence: Synthetic polynucleotide
  source 1..201: mol_type = other DNA
ttaggtgttattygttatttttttttttgatttagaaagggaattttttgattttttgygttttttaggtgaggtaatgtttygttttgtttyggttygygtayggtgygtatatatattggtttgygtttattgtttggtattttttagtgagatgaattyggtattttagatggaaatgtagaaattattygttttttg

SEQ ID NO: 15171 - DNA, 201 bp, synthetic construct
  misc_feature 1..201: note = Description of Artificial Sequence: Synthetic polynucleotide
  source 1..201: mol_type = other DNA
tttagtttatygttgtattgtgagagtttttttttgggttggttaaggttagagttygtttttttagtttgtagggaggtgtggatggagaggygtgagygggaatttaggttgtgtatggtgtttgygggttagttggagtttygggtgggygtgggtttggtaggtttygtattgggagtagtyggtyggttttgttag

SEQ ID NO: 15172 - DNA, 201 bp, synthetic construct
  misc_feature 1..201: note = Description of Artificial Sequence: Synthetic polynucleotide
  source 1..201: mol_type = other DNA
ggggagagggattgattttttgtgttttatttttagtttatttaattttagtgtagtttggagattgttatygtgtttttyggagggygatggagttttygttttgtttaggagtagtttggttttygggagggtagtttgatttttayggtattgtyggtgattttttagtttaggtttyggggttgygagaattttaag

SEQ ID NO: 15173 - DNA, 201 bp, synthetic construct
  misc_feature 1..201: note = Description of Artificial Sequence: Synthetic polynucleotide
  source 1..201: mol_type = other DNA
atgagygttatygayggtagagtygttttttttatgttttgtggggatygggaagagatygtagggagtgaggtattttattygtttattyggtagattygaagattgagattygagagttygtagtttygggttatatttttagygtttggtttagttttttttttatttttttattygttttttgtagaygaggggttt

SEQ ID NO: 15174 - DNA, 201 bp, synthetic construct
  misc_feature 1..201: note = Description of Artificial Sequence: Synthetic polynucleotide
  source 1..201: mol_type = other DNA
gttgtaattttattgagtgtgtttgtttattagatatttgattttgtaagattgttttttttttttttttttgayggagtttygttttgtygtttaggtygaagtgtagtggygygatttyggtttattgtaagtttygtttttygggtttatgttatttttttgttttagtttttygagtagttgggattataggygttc

SEQ ID NO: 15175 - DNA, 210 bp, synthetic construct
  misc_feature 1..210: note = Description of Artificial Sequence: Synthetic polynucleotide
  source 1..210: mol_type = other DNA
ttttgggtttttattttttttttttttttttttttttttttgagaygaagttttattttgtygttygggttggagtgttgtggtaggatttyggtttatygtaagtttygtttttyggatttaygttatttttttgttttagtttttygagtagttgggattagaggygttygttatygygttaggttaatttttttgtatttttagtag

SEQ ID NO: 15176 - DNA, 201 bp, synthetic construct
  misc_feature 1..201: note = Description of Artificial Sequence: Synthetic polynucleotide
  source 1..201: mol_type = other DNA
taagttgggygyggtggtttaygtttgtaattttagtattttgggaggtttaggtaggyggattaygaggttaggagattaagattattttggttaatayggtgagaatttygtttttataaaaaatataaaaaattagtygggtgtttgtagttttagttattygggaggttgaggygagagaatggygtgaattygggg

SEQ ID NO: 15177 - DNA, 201 bp, synthetic construct
  misc_feature 1..201: note = Description of Artificial Sequence: Synthetic polynucleotide
  source 1..201: mol_type = other DNA
gggttaaagaggaatyggaaagggttyggggtagaygtgggygttatagggtgagtygggttaggttgagaggatttaygggttatgggagtttgtgggygayggttyggtaggggtttgyggygggaatagggataaaatatatttaataaattgtttatttagagtaagttgtgtgggtataatggygagaaaayggtt

SEQ ID NO: 15178 - DNA, 201 bp, synthetic construct
  misc_feature 1..201: note = Description of Artificial Sequence: Synthetic polynucleotide
  source 1..201: mol_type = other DNA
ggygggtgggttaygaagttaggagatygagattattttggttaatatggtgaaattttatttttattaaaaatataaaaaattagtttggtatagtggygggygtttgtagttttagttagttyggaggttgaggtaggagaatggygtgaattygggaggyggagtttgtagtgagtygagattgygttattgtattat

SEQ ID NO: 15179 - DNA, 201 bp, synthetic construct
  misc_feature 1..201: note = Description of Artificial Sequence: Synthetic polynucleotide
  source 1..201: mol_type = other DNA
gtttatgttattttaatagtgggttttttttyggtgagaattggttaatagttattgtttygtttttttagtatgttgtttgattagagagggatagggyggggaggaaaatyggggygtygtgggttgtagttttagttgtaaataygggagtttttttygaygtttgtggttygtyggttygaaagggagaaataygga

SEQ ID NO: 15180 - DNA, 201 bp, synthetic construct
  misc_feature 1..201: note = Description of Artificial Sequence: Synthetic polynucleotide
  source 1..201: mol_type = other DNA
ttatgaatttttgagtttaagtgatttttttatttggttttgygaagtgttgggattatatgtgtgagttattaygtygggattataggtgtgagttatygygtygggattatgggtatgagttattgygtyggtttttagtaaatattttattagtatttagtgaattttgggtttttgtggaataggaatgtttgtttt

SEQ ID NO: 15181 - DNA, 201 bp, synthetic construct
  misc_feature 1..201: note = Description of Artificial Sequence: Synthetic polynucleotide
  source 1..201: mol_type = other DNA
aggttgaggttggtggattataaggttaggagatygagattattttggttaatatggtgaaatttygtttttattaaaaatataaaaaaattagtygggygtggtggtgtgtatttgtagttttagttattygggagtttgaggtaggagaatggtatgaattygggaggtagagtttgtagtgagttaaaattgtattat

SEQ ID NO: 15182 - DNA, 201 bp, synthetic construct
  misc_feature 1..201: note = Description of Artificial Sequence: Synthetic polynucleotide
  source 1..201: mol_type = other DNA
aaggagatgtttgggttaggattgaagtttttyggaataaygggttgggattttgaggttggtaggggtgtagtgggtattgggtttatgtgtggtttgygttggtygaygtgggtatataaggggtatagttgttattgggggtttggaggggaggatttagttggggtttggagggttaggattttgtagaaggtttac

SEQ ID NO: 15183 - DNA, 201 bp, synthetic construct
  misc_feature 1..201: note = Description of Artificial Sequence: Synthetic polynucleotide
  source 1..201: mol_type = other DNA
tatggtgaaatttygttttaattaaaagtattaaaattatttgggtatggtggtatatgtttgtaattttagttattygggaggttgaggtaggagaatygtttgagttygggaggyggaggttgtagtgagtygtgatygygttattgtattttagtttgggygatagagtaagattttattttaataaaaaaattaaaa

SEQ ID NO: 15184 - DNA, 201 bp, synthetic construct
  misc_feature 1..201: note = Description of Artificial Sequence: Synthetic polynucleotide
  source 1..201: mol_type = other DNA
gygatttttttgttttagtttttygagtagttaggattataggygttygtttttaygttyggttaattttttgtatttttggtagagayggggttttatygtgttagtaaggatagtttygattttttgatttygtgattygtttgtttyggygttttaaagtgttgggattataggtatgagttatygygtttggtgggg

SEQ ID NO: 15185 - DNA, 201 bp, synthetic construct
  misc_feature 1..201: note = Description of Artificial Sequence: Synthetic polynucleotide
  source 1..201: mol_type = other DNA
agtgaaatttttttttattaaaaatttaaaaaaattagtygggtgtggtagtatgtgtttgtagttttagttattygagaggttgagataggagaatggygtgaattygggaggyggagtttgtagtgagtygagatygtgttattgtattttagygtgggygatagagtaagatttygttttaaaaaaaaagaaaataat

SEQ ID NO: 15186 - DNA, 201 bp, synthetic construct
  misc_feature 1..201: note = Description of Artificial Sequence: Synthetic polynucleotide
  source 1..201: mol_type = other DNA
agattatagatgaatttgaattttaagtagtatagatgygttatatttattattttgtygttgattattttygggattatattatatttattatttygtygttgattattttygggattattatggygggttatgatagtaygttttttttagaaataygtttgaatagtataagaaaaggatattattyggattygygga

SEQ ID NO: 15187 - DNA, 201 bp, synthetic construct
  misc_feature 1..201: note = Description of Artificial Sequence: Synthetic polynucleotide
  source 1..201: mol_type = other DNA
ygttgttatttataagagtttttttttttttgtaattaatggttttgtttttggtttgtttagtaaattgaaattatygaaaaaggattttgtygggagyggtggtttaygtttgtaatattagtattttgggaggtygaggygggttgattataaggttaggaaatygagattattttggttaatayggtgaaatttagt

SEQ ID NO: 15188 - DNA, 201 bp, synthetic construct
  misc_feature 1..201: note = Description of Artificial Sequence: Synthetic polynucleotide
  source 1..201: mol_type = other DNA
ttagagttaggygtttatygttaattyggagtgtgtgttttagttttttggggtygattttggttgttgggttagtagtgtgaattttttttttttatayggggtttttaagataygtgtttgtgtgtgttygtttttaagatatgtgtgtgtgtatatgtgtgtgtgtgtgtgtgttttatatgaaygatttgagttatt

SEQ ID NO: 15189 - DNA, 201 bp, synthetic construct
  misc_feature 1..201: note = Description of Artificial Sequence: Synthetic polynucleotide
  source 1..201: mol_type = other DNA
gttagtgtttttayggtagtttttgtattgggttyggggtgggggyggggggtggttgtggagtttttggtttttatttagygtgttttttttayggggygtattttaaagygataagatgttttttaggaaatggggaatggaygttaggtttttagggagaggttgaggtagtttgaggtaaaaagggaygggtygagg

SEQ ID NO: 15190 - DNA, 201 bp, synthetic construct
  misc_feature 1..201: note = Description of Artificial Sequence: Synthetic polynucleotide
  source 1..201: mol_type = other DNA
gggtgtttatggagtttttagtttttatttagggtgygtgttttttttayggggggtattttaaaggggtatgaagtttttygggggatggggatatgaygttaggtttttagtgggatattgagatagtygggggaaaaaagtygggagggtaagaaggttggggtatttttatggaggttagtttttttttagtagttt

SEQ ID NO: 15191 - DNA, 201 bp, synthetic construct
  misc_feature 1..201: note = Description of Artificial Sequence: Synthetic polynucleotide
  source 1..201: mol_type = other DNA
gtatttattgttttgtattaattgtttagtattttttagtgagatgaattygttattttagttggaaatgtagaaattatttattttttgygtygtttaygttgggagttgtagatyggagttgtttttattyggttattttggttttattttattatattttttttatttagtttattattgatggatatttgggttggt

SEQ ID NO: 15192 - DNA, 201 bp, synthetic construct
  misc_feature 1..201: note = Description of Artificial Sequence: Synthetic polynucleotide
  source 1..201: mol_type = other DNA
gtaggtgttagggagaggtaattttttaaatagataaaaatatttttggtygggygyggtggtttatgtttgtaattttagtatttygggaggtygaygygggyggattaygaggttaggagatygagattatttttgttaatayggtgaaatttygtttttattaaaaatataaaaaattagtygggtgtggtggygggc

SEQ ID NO: 15193 - DNA, 201 bp, synthetic construct
  misc_feature 1..201: note = Description of Artificial Sequence: Synthetic polynucleotide
  source 1..201: mol_type = other DNA
tggttttattatgttagttaggatggttttaattttttgatttygtgattygttygttayggttttygaaagtgttgtgattataggtatgagttatygygttyggtttaaaataatttttgaggttatataagaatatagtttatgtttatttatagttgtatttaatttaattaagaatttgttttttaagatgaaaaa

SEQ ID NO: 15194 - DNA, 201 bp, synthetic construct
  misc_feature 1..201: note = Description of Artificial Sequence: Synthetic polynucleotide
  source 1..201: mol_type = other DNA
ygggttttygatttgygtggatgagtagttttgagttttatatagggygggtgaygttgtagattgataaggtttatttttggttatattgagttaaagyggaaggggtgtaggtgtggagtgttatgtgygatgttattgtyggttagttggagtggaggtgttygttatgtgtatggggagaygtgtttttggttagtt

SEQ ID NO: 15195 - DNA, 366 bp, synthetic construct
  misc_feature 1..366: note = Description of Artificial Sequence: Synthetic polynucleotide
  source 1..366: mol_type = other DNA
tygttttgtagtttgattttagattgttgtgttagtaattagtgagatttygtgggygtaggattttttaagttaggtgtgggatatagtttygtggtgygttattttttaagtyggtttgaaaagygtaatattygggtgggagtgattygattttttaggtgygtyggttatttttttttttgattyggaaagggaattttttgatttttggygttttttaggtgaggtaatgtttygttttgtttyggttygtttayggtgygygtatttattggtttgygtttattgtttggtattttttagtgaggtgaattyggtattttagatggaaatgtagaaattattygttttttgygtygttta

SEQ ID NO: 15196 - DNA, 201 bp, synthetic construct
  misc_feature 1..201: note = Description of Artificial Sequence: Synthetic polynucleotide
  source 1..201: mol_type = other DNA
ggtttttgtagggtygagtttttttaatgagygttgttttttgttttayggygttyggttttatygatygtttaagggttgaggattgtgggagtattgygygggattggtaggtagttttatttgyggttttyggtgygggatttattgggtgaagttagttgggttygtgagtttagtgtggatttggagaatttttat

SEQ ID NO: 15197 - DNA, 201 bp, synthetic construct
  misc_feature 1..201: note = Description of Artificial Sequence: Synthetic polynucleotide
  source 1..201: mol_type = other DNA
ygtagaagatgagtgatttttgtatttttatatgaggtatygggtttattttattagggagtgttagatagtgggygtaggatagtgggtgtagygtatygtaygygagtygaagtagggygaggtattgttttatttyggaagtataaggggttagggagtttttttttttagttaaagaaaggggtgatagayggtatt

SEQ ID NO: 15198 - DNA, 201 bp, synthetic construct
  misc_feature 1..201: note = Description of Artificial Sequence: Synthetic polynucleotide
  source 1..201: mol_type = other DNA
tttttttttttagttaaagaaaggggtgatagatagtatttggaaaatygggttattttaatyggaatattgtatttttttaataggtttaaaaaayggygtatttggagattgtatttygtatttggttyggagggttttatgtttayggagtttygttgattgttagtatagtagtttgagattaaattgtaaggyggt

SEQ ID NO: 15199 - DNA, 384 bp, synthetic construct
  misc_feature 1..384: note = Description of Artificial Sequence: Synthetic polynucleotide
  source 1..384: mol_type = other DNA
ttygtttttttggtttttgttgtttatgagaaatgaggaaaaataaaggttagatttttaataattttttyggaagaaagagttgttttgagtgggtgtyggtgtttatataygttgtttttaaaaaaatttgttttgtttaggtttgtgtgaatataaygtyggatgaattttgtttttttagaagaaagtygggttggtgtgttygatgaygtagygtttgtagtggygtttgataaagygtagggtttttayggagatttygtagttttggatatttagygtttggaggttaaagtagttggyggttaygatttgtaagttttggtyggtgatgttttygtaggatttgaggttgagtygtttgaggttgaagtagtttag

SEQ ID NO: 15200 - DNA, 216 bp, synthetic construct
  misc_feature 1..216: note = Description of Artificial Sequence: Synthetic polynucleotide
  source 1..216: mol_type = other DNA
tgggagtgattygattttttagttgygtttattatttttttttttgattyggaaagggaattttttgattttttgygttttttaggtgaggtaatgtttygttttgtttyggttygygtayggtgygygtatttattggtttgygtttattgtttggtattttttagtgagattaattyggtattttagatggaaatgtagaaattattygttttt

SEQ ID NO: 15201 - DNA, 334 bp, synthetic construct
  misc_feature 1..334: note = Description of Artificial Sequence: Synthetic polynucleotide
  source 1..334: mol_type = other DNA
ttgtgttggtaattagygagatttygtygggtaggatttttygagttagatgygggatataatttygtggtgygtygttttttaggtyggttygaaaagygtaatattygggtgggagtgattygattttttaggtgygttygttatttttttttttgattaggaaagggaattttttgatttttggygtttttygagtgaggtattgttttattttgtttyggttygygtayggtgygygtatttattgatttgtgtttattgtttggtattttttagtgagatgaattyggtattttagatggaaatgtagaaattatygttttttatgtta

SEQ ID NO: 15202 - DNA, 201 bp, synthetic construct
  misc_feature 1..201: note = Description of Artificial Sequence: Synthetic polynucleotide
  source 1..201: mol_type = other DNA
ttygatgtaaggyggggtaggtaaaagttyggtagttattygagaaggtgtgattaaaayggaggaattygagagatttttygaggattgtaggttyggygyggagttygygtttaatggtttggtttatggtagygyggaggttattttggttttaaygttyggtgtttttgggtygtattagtaagattttaggatttt

SEQ ID NO: 15203 - DNA, 270 bp, synthetic construct
  misc_feature 1..270: note = Description of Artificial Sequence: Synthetic polynucleotide
  source 1..270: mol_type = other DNA
tttyggttttygttygtgtttttttttttatattttttygtaagttgagggagtyggtttyggttttggttagtttaggaatgggtttttatagtgtagyggygggttgaagggttttttaagygyggttagagtgggtgttaaggtygaggaggygttaagagygagygagggttgtgagggttgttatgtyggtatattgttattttttagaaggaygtagggtagagttttaggttggttttgttatttatgttggagtgtagtggt

SEQ ID NO: 15204 - DNA, 253 bp, synthetic construct
  misc_feature 1..253: note = Description of Artificial Sequence: Synthetic polynucleotide
  source 1..253: mol_type = other DNA
ggtyggaaaagygtagtatttyggtgggagtgattygattttttaggtgygttygttatttttttttttgattyggaaayggaattttttgattttttgygttttttaagtgaggtaatgtttygttttgtttyggttygygtayggtgygygtatttattgatttgygtttattgtttggtattttttagtgagatgaattyggtattttagatggaaatgtagaaattatttgttttttaygtygtttayg

SEQ ID NO: 15205 - DNA, 204 bp, synthetic construct
  misc_feature 1..204: note = Description of Artificial Sequence: Synthetic polynucleotide
  source 1..204: mol_type = other DNA
taaattagtaaatttaatattttaggatttttgttaagaagtttggttttggtygggaggatggagtttagygggtagyggagttgttttagtttttgtygtygtttygttygggagggaggtggggggggttagtttttttgttyggttagtygtttygttygggaggtgaggggygtttttgttyggtygtttttattggga

SEQ ID NO: 15206 - DNA, 228 bp, synthetic construct
  misc_feature 1..228: note = Description of Artificial Sequence: Synthetic polynucleotide
  source 1..228: mol_type = other DNA
attygggaagtataaggggttagggagtttttttttttggttaaggaaaggggtgatagatagtaygtggaaaattaggttttttttattygaatattgygttttttttaygggtttaaaaatyggygtattaggagattatatttygtatttggttyggagggttttaygtttayggagtttygtygattgttagtatagtagtttgagattaaattgtaaggtagt

SEQ ID NO: 15207 - DNA, 217 bp, synthetic construct
  misc_feature 1..217: note = Description of Artificial Sequence: Synthetic polynucleotide
  source 1..217: mol_type = other DNA
tttagtggtygtaggggttgtygtgtgttttgtagatggataygygttatttaatatagagatgygttgagttygggtgattagtgaatygtaygttatygtagatattagaaagygaaagtataygggggaaggtttygggtatagatttagtayggttattattygagttggagttgtttgygagaygatgagygtttgtaatttgtattttgyg

SEQ ID NO: 15208 - DNA, 201 bp, synthetic construct
  misc_feature 1..201: note = Description of Artificial Sequence: Synthetic polynucleotide
  source 1..201: mol_type = other DNA
ttyggtgtttaatttttgaattttaaggaaaaatagggtagaatagaaagtgaaataggttygaaggtatttatygtgtggtaatattttagaygagttygatggtatttatygtgtggtaatattttagaygaatatttaagatgtgttyggagttggttttttttagtgggtttgtggttttagtgattttaagaatga

SEQ ID NO: 15209 - DNA, 204 bp, synthetic construct
  misc_feature 1..204: note = Description of Artificial Sequence: Synthetic polynucleotide
  source 1..204: mol_type = other DNA
ayggtgygtatatttattgatttgtgtttattgtttggtattttttagtgagatgaattyggtattttygatggaaatgtagaaattatttatttttygygtygtttaygttgggagttgtagatyggagttgtttttatttggttattttggtttttttttggtattttttttattttttatttaggattagtttgttgtttt

SEQ ID NO: 15210 - DNA, 223 bp, synthetic construct
  misc_feature 1..223: note = Description of Artificial Sequence: Synthetic polynucleotide
  source 1..223: mol_type = other DNA
tagaagtataagtaatygtttttttttgtattttagtggaaygtygtgggttttttgaagatttttttttgttttgtaggtttyggtattttaagtaygygagtttgygtaggaggygtttygtttttyggagttttttattgttttttagatatagtttyggttttttatttygggyggaggtttttttagaygggtttygattgtttttgtatgtttattg

SEQ ID NO: 15211 - DNA, 201 bp, synthetic construct
  misc_feature 1..201: note = Description of Artificial Sequence: Synthetic polynucleotide
  source 1..201: mol_type = other DNA
tatttataaggttgaggtaggagaattgtttgaagtygggaggyggaggttgtaatgagtygagattatattattgtattttagtttgggygataagagygaaattttgtaataatattaataataataataaaataaaaataaaaataaaaaagaaaataagagaygyggtggttttgtttgtaattttagtattttggg

SEQ ID NO: 15212 - DNA, 203 bp, synthetic construct
  misc_feature 1..203: note = Description of Artificial Sequence: Synthetic polynucleotide
  source 1..203: mol_type = other DNA
tttaatattaagttaggtttagggaagtgttttttttttttttttttttttttatttgagaygtagttttattttgttatttaggttggagtatagtggygygatttyggtttattgtaagtttygtttttygggtttaygttattttgttgttttagtttttygagtagttgggattatygttygattaatttatttgtatt

SEQ ID NO: 15213 - DNA, 201 bp, synthetic construct
  misc_feature 1..201: note = Description of Artificial Sequence: Synthetic polynucleotide
  source 1..201: mol_type = other DNA
tataaaaagaattataaaatattgttgaaaaaaattagataatagtygggygyggtgttttatgtttgtaattttagtagtttgggaggtygagttgggyggattaygaggttaggagatttagattatttyggttaatayggtgaaatttyggtgaaatttygtttttattaataatataaaaaaattagtygggygtgg

SEQ ID NO: 15214 - DNA, 201 bp, synthetic construct
  misc_feature 1..201: note = Description of Artificial Sequence: Synthetic polynucleotide
  source 1..201: mol_type = other DNA
attattgttaaaaattaaattgggtygggygyggtggtttaygtttgtaattttagtattttggggggtygaggttggyggattaygaggttaggagatygagattattttggttaatayggtgaaattttatttttattaaaaatataaaaaattagtygggygaggtggtaggtatttgtagttttagttattygggag

SEQ ID NO: 15215 - DNA, 201 bp, synthetic construct
  misc_feature 1..201: note = Description of Artificial Sequence: Synthetic polynucleotide
  source 1..201: mol_type = other DNA
tttgttttgattttgtttgtgggtgtygggatatttgggtgtagagggtttgtgtttagttagaagygatttttgtttttttttgygtaggygttggtgygttygtygygtgtgygtggttygtgtgtygttgtttyggtttgygtttttatatgtgtaggaaaggataygtygtttgtttttaygttttttgtgattttt

SEQ ID NO: 15216 - DNA, 201 bp, synthetic construct
  misc_feature 1..201: note = Description of Artificial Sequence: Synthetic polynucleotide
  source 1..201: mol_type = other DNA
gaggttgaggtaggagaattatgtgaattyggaaggyggagtttgtagtgagtygagatygygttattgtattttagtttgggygatagagygagatttygttttaaaaaaaaaaaaaaaaaaaaaaaaagtgatttgggtygggygyggtggtttaygtttgtaattttagtattttgggaggtygaggagggtagatta

SEQ ID NO: 15217 - DNA, 201 bp, synthetic construct
  misc_feature 1..201: note = Description of Artificial Sequence: Synthetic polynucleotide
  source 1..201: mol_type = other DNA
tattagttaggtatggtagtatatgtttgtaattttagttattygggaggttgaggtaggagaatygtttgaattygggaggtggagattgtagtaagtygagttygtgttattttattttagtttgggtaagagygaaattttattgggaaaaaaaaatttatagtttaggtygggygyggtggtttaygtttgtaattt

SEQ ID NO: 15218 - DNA, 201 bp, synthetic construct
  misc_feature 1..201: note = Description of Artificial Sequence: Synthetic polynucleotide
  source 1..201: mol_type = other DNA
ggttagtttttygttyggttagtygttttattygggaggtgaggggygtttttgttyggtygtttttattgggaagtgaggagtttttttgttyggttaygatttygtttgggaggtgtgtttagtagtttattggggatgggttatgatgataatggyggttttgtggaatagaaaggygggaagggtggggaaaaaatt

SEQ ID NO: 15219 - DNA, 201 bp, synthetic construct
  misc_feature 1..201: note = Description of Artificial Sequence: Synthetic polynucleotide
  source 1..201: mol_type = other DNA
attggttaaagagtattgtgggttttyggaagtatttgtttttttattagttgtaaatyggaatgataattagtttttaggttttggtttttgaatgtaygttgygaaygatgtattgttttggttttatggtaggggttggggaggttygttttattttgtatttygattygggtttaaagttgagtttgaagggttttt

SEQ ID NO: 15220 - DNA, 201 bp, synthetic construct
  misc_feature 1..201: note = Description of Artificial Sequence: Synthetic polynucleotide
  source 1..201: mol_type = other DNA
ttygttattaygttyggttaattttttgtatttttagtagagayggggttttatygttttagttgggatggtttygattttttgatttygtgatttgttygtttyggttttttaaagtgttgggattataggygtgagttatygtattyggttttttttttttttttttttttttaagatagagttttattttgttgttta

SEQ ID NO: 15221 - DNA, 201 bp, synthetic construct
  misc_feature 1..201: note = Description of Artificial Sequence: Synthetic polynucleotide
  source 1..201: mol_type = other DNA
atttyggaaagtataggaggttatgttttagtgtggttttttttttttgggtttaagttaaggtttttatygtgtttgtyggtttttygggtttttgygyggtggattttggatttttttgtttygttttgttttagggtttttgtatttgttgttatygyggtttggaaygttttttttttgaaattttgtgatttttat

SEQ ID NO: 15222 - DNA, 201 bp, synthetic construct
  misc_feature 1..201: note = Description of Artificial Sequence: Synthetic polynucleotide
  source 1..201: mol_type = other DNA
tgtgtttataagaatattagttattggatttagggtttatttaatttagtatgattttattttaatttgattatatttgaaaagatttttggtygggygyggtggtttatgtttataattttattattttgggaggtygaggtaggtggattatttgaggttaggagttygagattagtttggttaatatggggaaatttt

SEQ ID NO: 15223 - DNA, 211 bp, synthetic construct
  misc_feature 1..211: note = Description of Artificial Sequence: Synthetic polynucleotide
  source 1..211: mol_type = other DNA
tttagtttttaggaygtgttttttatggttttttttgyggtgtggttaygttyggatttttttggtattttttatttgtttygtaygatttgttttgygygatttgtttygtaaggtyggggggagygtttttttttttygygattttttattttttttyggtattygtttatttygttgtttaggttttttgttttttyggttttagggc

SEQ ID NO: 15224 - DNA, 201 bp, synthetic construct
  misc_feature 1..201: note = Description of Artificial Sequence: Synthetic polynucleotide
  source 1..201: mol_type = other DNA
gtgygygtatttattgatttgygtttattgtttggtattttttagtgagatgaatygggtattttagatgtaaatgtagaaattattygttttttttgtygtttaygttgggagttgtagatyggagttgtttttattyggttattttggttttttttttygaaaagagtattttttaattaagaagatggttttggttgt

SEQ ID NO: 15225 - DNA, 201 bp, synthetic construct
  misc_feature 1..201: note = Description of Artificial Sequence: Synthetic polynucleotide
  source 1..201: mol_type = other DNA
atttagtggattttatatyggggttgtaggtggagttgtttgttagttttgygtygtgtgtttatattttttagtttttgggtggtygatgggattgggygtygtggagtagggggtggtattygttygggaggtttgggyggtataggagtttatggagtgggtgggaggtttaggtatggtgggttgtaggttttgagt

SEQ ID NO: 15226 - DNA, 201 bp, synthetic construct
  misc_feature 1..201: note = Description of Artificial Sequence: Synthetic polynucleotide
  source 1..201: mol_type = other DNA
gatatgtataggttatttaagagaatgatygatttttggttattyggtgtttgtttgttgyggtggygttgtgtygggtttaggggttttagggattttygtygtgttgttagttttggaattttagtggggatttgttgtgtggaaattttyggataatagttttttttatggagaatttaygtttttataatgttatta

SEQ ID NO: 15227 - DNA, 201 bp, synthetic construct
  misc_feature 1..201: note = Description of Artificial Sequence: Synthetic polynucleotide
  source 1..201: mol_type = other DNA
ttatttttttatatttgtagagygttttattttttgtaaygtttatttgygaaattgttgygttaggttaggagtattttaagagygagaggtagaygtygtttgattttttattttgataggggatttttttatttggtagtgttaatattyggtttttaygtattttttatggaggattattaggttagtttatgggag

SEQ ID NO: 15228 - DNA, 201 bp, synthetic construct
  misc_feature 1..201: note = Description of Artificial Sequence: Synthetic polynucleotide
  source 1..201: mol_type = other DNA
ttttggtagagttagtattygattttttttgttyggagatttaggygayggtgtygtgtgatttttgatttygyggatgaggaaggtagagagagagygygtagatayggaggtyggygttgaggttgagggagttatattyggtygtaagtttgagggagggaagtygggtgyggaaatagtttagygggtttagaagtc

SEQ ID NO: 15229 - DNA, 201 bp, synthetic construct
  misc_feature 1..201: note = Description of Artificial Sequence: Synthetic polynucleotide
  source 1..201: mol_type = other DNA
tygttgttaygtttagttaattttttgtattgtttagtagagayggggttttatygtgttagttaggatggtttygattttttgattttgtgatttgttygtttyggttttttaaagtgttgggattataggtatgaattatygtattyggttaatttagtggttttgaggaggattygttaggagttttgtaaaatgttt

SEQ ID NO: 15230 - DNA, 201 bp, synthetic construct
  misc_feature 1..201: note = Description of Artificial Sequence: Synthetic polynucleotide
  source 1..201: mol_type = other DNA
atyggatggaygtttgttgttgttttatyggggtygtgtggggagtygagtgygaggtttgttyggatttygagtttttggagttygttagtttgtgttygygggggttgggtttygttagtygggattttttgtttggtygattattttataaaggtgyggttggggaaggggttaggtttttggaaggatggggagggg

SEQ ID NO: 15231 - DNA, 201 bp, synthetic construct
  misc_feature 1..201: note = Description of Artificial Sequence: Synthetic polynucleotide
  source 1..201: mol_type = other DNA
ttataggtgtgagttattyggtttttttttttttttttttttttttttgagaygaagttttatttttgttttttaggttggagtgtaaaggygtaatttyggtttattataatttttatttttygggtttaggtaatttttttgttttaatttttggagtagttgggattataggtgtttgttattaggtttggttaattt

SEQ ID NO: 15232 - DNA, 201 bp, synthetic construct
  misc_feature 1..201: note = Description of Artificial Sequence: Synthetic polynucleotide
  source 1..201: mol_type = other DNA
attattyggtttagtaggtagaggygtaggaatatggggatggatagtagtaygtttaygtyggtttyggttatygagggygygtaygtgaaggttagtygygtygtttaygtgaagyggtagtggtygggtatygggtgaatggygtatattgttagttttagygagatgaggaataygygttygtaggttatggygatg

SEQ ID NO: 15233 - DNA, 201 bp, synthetic construct
  misc_feature 1..201: note = Description of Artificial Sequence: Synthetic polynucleotide
  source 1..201: mol_type = other DNA
gtagttttagttattttaaaggtagaggtgagaatygtttgaattyggaaggagtaggttttagtgagttgaggttatgttatttttttttagtttgggygatagagaaagattttgtttagaaaaagtaaattatgggagtyggygtyggygagygtygttygggaggtagyggttggaggagyggaygggtttygyggg

SEQ ID NO: 15234 - DNA, 201 bp, synthetic construct
  misc_feature 1..201: note = Description of Artificial Sequence: Synthetic polynucleotide
  source 1..201: mol_type = other DNA
gaggttgaggtaggagaatggygtgaattygggaggyggagtttgtagtgagtygagatttygttattgtattttagtttgggygatagagygagatttygttttaaaaaaaaaataaaaataaaaataaaataaaataaaaaatgagttgggtatgatggtataagtttgtggttttagttatttaggaggttgaggtgg

SEQ ID NO: 15235 - DNA, 201 bp, synthetic construct
  misc_feature 1..201: note = Description of Artificial Sequence: Synthetic polynucleotide
  source 1..201: mol_type = other DNA
gtagtttaataattttgygttgtaaatttaaatattttatatattattagatattaaaaataaagatttatgttgttygtttttayggagtgaggatttygttgattttatattyggttatgaatttgtttgaggtttattagttgaaygttttyggttaagaaagttygtygagtgggggyggtttttaaattattattt

SEQ ID NO: 15236 - DNA, 201 bp, synthetic construct
  misc_feature 1..201: note = Description of Artificial Sequence: Synthetic polynucleotide
  source 1..201: mol_type = other DNA
gtgtattttggtttattataatttttattatattygttttttttaggtttaagtgatttttttattttagtttttttagtagttgggattataggtgtayggtattatgatyggttaatttttgtattttttgtagagatgggattttgttatgttatttaggttggtttygaatttttaagttaaagtaattygtttgtt

SEQ ID NO: 15237 - DNA, 201 bp, synthetic construct
  misc_feature 1..201: note = Description of Artificial Sequence: Synthetic polynucleotide
  source 1..201: mol_type = other DNA
ttttatttttattaaaaatataaaaaattagttaggygtggtggtaygttttgtaattttagttattygggaggttgaggtaggagaattgtttgaaygygggttggggaggttgyggtgagtygagattgtattattgtattttagttygggtgatagtgtaagattttattttaaaaaaaaaaaaaatttgttaattta

SEQ ID NO: 15238 - DNA, 201 bp, synthetic construct
  misc_feature 1..201: note = Description of Artificial Sequence: Synthetic polynucleotide
  source 1..201: mol_type = other DNA
taygtattatttatatgagtttttagtaggtttyggttttaaataggtatatgygtatttttttagttttttattgggattttttygttaagttaygttygatgtttttgtttatagttatgagttgtagtaagatgtttaggttyggtgttagygtgygtagtaygtgtgttagtatygtggaatttttgtygttygagg

SEQ ID NO: 15239 - DNA, 201 bp, synthetic construct
  misc_feature 1..201: note = Description of Artificial Sequence: Synthetic polynucleotide
  source 1..201: mol_type = other DNA
tggtattttggaaggtygaygtgggggtattatttgagattaggggttygagattagttttgygaaygtgatgaaatttygtttttattgaaaatttaaygattagtygggggtggtggtgtatgtttgtaattttagttatttaggaggttgaggtaggagaatygtttgaattyggaaggtggaagttgtaatgagtyg

SEQ ID NO: 15240 - DNA, 201 bp, synthetic construct
  misc_feature 1..201: note = Description of Artificial Sequence: Synthetic polynucleotide
  source 1..201: mol_type = other DNA
ttgaggtgggtygggygyggtggtttaygtttgtaattttaatattttgggaggtygaggggggtggattatttgaggtgggttyggygtggtggtttaygtttgtaattttaatattttgggaggttgagaggggtggattatttgaggtgggtygggygyggtggtttaygtttgtaattttaatattttgggaggtyg

SEQ ID NO: 15241 - DNA, 201 bp, synthetic construct
  misc_feature 1..201: note = Description of Artificial Sequence: Synthetic polynucleotide
  source 1..201: mol_type = other DNA
ggggtttyggttaggggtgggtgaggttggtgtttttttaggttttttttagttataggtagtaggtgttatgggagttttgtyggtatttttttttttygttagggttttggtttatttgatggygtagtttttttttaaggtgtgtatyggygtagatattgtgtaggaagttaggttgatgtagayggtttttaagtc

SEQ ID NO: 15242 - DNA, 201 bp, synthetic construct
  misc_feature 1..201: note = Description of Artificial Sequence: Synthetic polynucleotide
  source 1..201: mol_type = other DNA
aaagttgtttaaagttttataatgagttgatttatygggaataggaggaggtttygtygttagtttttgtgttatatttggtatttygtttaggtttatyggagaggagattataygttttttttttagtttttttaatttttttagttaagataggtgttattatttattttagttttagtgtgttttgagtgtgtygga

SEQ ID NO: 15243 - DNA, 201 bp, synthetic construct
  misc_feature 1..201: note = Description of Artificial Sequence: Synthetic polynucleotide
  source 1..201: mol_type = other DNA
tatttttttgttttagtttttygagtagttgggattataggygttygttattgygttyggttaattttttgtatttttttagtagagayggggttttatygtggtttygattttttgatttygtgattygtttatttyggttttttaaagtgttgggattataggygtgagttatygygttyggtygtgtgtgttttttaa

SEQ ID NO: 15244 - DNA, 201 bp, synthetic construct
  misc_feature 1..201: note = Description of Artificial Sequence: Synthetic polynucleotide
  source 1..201: mol_type = other DNA
gtaygtggtagtaggatttatttttggggtgtttygggtyggtgaatttatatttttttaygttaatggttygtagtatttgtagttygtgggtygagtyggttgtggggggtttattggtggtaggggtattattggggagagtggyggayggttgggttggyggyggtggaggtagtaggggttttgttatgtggtygt

SEQ ID NO: 15245 - DNA, 279 bp, synthetic construct
  misc_feature 1..279: note = Description of Artificial Sequence: Synthetic polynucleotide
  source 1..279: mol_type = other DNA
ggtggaagagttgatagtaaggggagtggttaaayggaggyggggtttggaagggggygtggtttgygggtttttgggtygttyggtttttttaggtgtygtagyggaaggtttggagtagaggttgttttttygtttaagtattttttgggtgagtttatatttttggygygagtaygatttttttttttagggaaggtygggtttttygttggggttygattygattttttttttttatttttttttttttgttttatatttagygagtttaggttt

SEQ ID NO: 15246 - DNA, 201 bp, synthetic construct
  misc_feature 1..201: note = Description of Artificial Sequence: Synthetic polynucleotide
  source 1..201: mol_type = other DNA
ttataygggaggttgaggttagagaatggygtgaattygggaggtagagttygtagtgagtygagatggtattattgtattttagtttgggygatagagygagatttagttttaaaaaaaaaaaaaaaaaaaaaggaaaatttaggtttttttttagattgaaatttttgtaaatataatttatgattttatagtagttag

SEQ ID NO: 15247 - DNA, 201 bp, synthetic construct
  misc_feature 1..201: note = Description of Artificial Sequence: Synthetic polynucleotide
  source 1..201: mol_type = other DNA
ttttgttgtaaaagaagtgtttatagaatttttatttttttttattattattattttttgagatagagtygttgtygttygggttggagtatagtggtaygatttyggttaattgtaagtttygtttttygggtttaygttatttttttgttttagttttattttttygtttygtttygtttygtttygtttygttttyga

SEQ ID NO: 15248 - DNA, 201 bp, synthetic construct
  misc_feature 1..201: note = Description of Artificial Sequence: Synthetic polynucleotide
  source 1..201: mol_type = other DNA
gtttttttaatattttgaaatttaaagtgtgatagttttagaggattattaatataagtattatttgaaaatttgttagaaatgaagaattaggtygggygyggtggtttaygtttataattttagtattttgggaggtttagatgggaggattaygatattaggagatygagattattttggttaatayggtgagatttc

SEQ ID NO: 15249 - DNA, 201 bp, synthetic construct
  misc_feature 1..201: note = Description of Artificial Sequence: Synthetic polynucleotide
  source 1..201: mol_type = other DNA
tatggtgaaaatttgttttttttaaaaatataaaaattagttaggygtagtggtatgygtttgtagatttagttatttgggtggttgaggtaggagaatygttggaattygggaggtygaggttgtagtgagtygagatygtattattgtattgtagtttgggtgatagaataagattttaatttaaaaataataataata

SEQ ID NO: 15250 - DNA, 201 bp, synthetic construct
  misc_feature 1..201: note = Description of Artificial Sequence: Synthetic polynucleotide
  source 1..201: mol_type = other DNA
tttgtttaggaaatgtatataggagttggttattttgtgttttgagttttttyggaggtgttggatttttagagagagaaatagagataygtaagagggygaagatgttttagtggtgatatattggggagtttygtttaygattygtttaygatyggtatatttaatttgttttayggaattttattttatagttyggtt

SEQ ID NO: 15251 - DNA, 201 bp, synthetic construct
  misc_feature 1..201: note = Description of Artificial Sequence: Synthetic polynucleotide
  source 1..201: mol_type = other DNA
ygttaggataagygagggtggtttgagttttgtgtttatatggygtatgtygtttagtagatgatattgayggtygtaaaygtygtagggaatatagygygggygtaaatgttaatggtgtttgygtygatgggtttgagtygggtayggatgtttttttggttttttgagygggttgtttttttttttttygtttttttt

SEQ ID NO: 15252 - DNA, 201 bp, synthetic construct
  misc_feature 1..201: note = Description of Artificial Sequence: Synthetic polynucleotide
  source 1..201: mol_type = other DNA
tttttgttgagagtggatttygtgygtgtgttttttaggaayggtgataagtaygayggygattgggttygggatyggygttagggatayggggtgttgygttgygtygayggttttatttataaggtattygggggygygyggtatttgttgtttagagggtataggtttygtggtgggtagggygygtggggtgtatgg

SEQ ID NO: 15253 - DNA, 201 bp, synthetic construct
  misc_feature 1..201: note = Description of Artificial Sequence: Synthetic polynucleotide
  source 1..201: mol_type = other DNA
gatattatattttatatttttttattttttttgattyggagtttygttttgtygtttaggtttgggtgtagtagygygatttyggtttattgtaagtttygtttttygggtttatattatttttttgttttagtttttygagtagttgggattataggtgttygttattaygttyggttaattttttgtatttgtagtaga

SEQ ID NO: 15254 - DNA, 201 bp, synthetic construct
  misc_feature 1..201: note = Description of Artificial Sequence: Synthetic polynucleotide
  source 1..201: mol_type = other DNA
tttttttttagaaagtatatgaataggtygggtayggtggtttaygtttgtaattttagtattttgggaggtygaggygggtggattaygttagaagatygagattattttggttaatayggtgaaatttygtttttattaaaaatataaaaaaaaataagtygggygtggtagtgggygtttgtggttttagttattttg

SEQ ID NO: 15255 - DNA, 201 bp, synthetic construct
  misc_feature 1..201: note = Description of Artificial Sequence: Synthetic polynucleotide
  source 1..201: mol_type = other DNA
gtgtgagagttatatgttaggaataagaggtatgtygagaggtggtygggtayggtggtttaygtttgtaattttagtattttaggaggaygaggtgggyggattataaggttaggagatygagattattttggttaatatggtgaaatttygtttttattaaaaatataaaaaattagtygggygtggtggygggygttt

SEQ ID NO: 15256 - DNA, 203 bp, synthetic construct
  misc_feature 1..203: note = Description of Artificial Sequence: Synthetic polynucleotide
  source 1..203: mol_type = other DNA
ttttataaygttttttattatttgtgagtayggtttgtaaygtggaagatataattttatttgattttttttagatttttttgttgttttagttttttaygygttagttttygggtttttattttaaatttttttaggtttagaatgttttgttttaaattttatygatattatttgygaaattgtagttttttatgattaat

SEQ ID NO: 15257 - DNA, 201 bp, synthetic construct
  misc_feature 1..201: note = Description of Artificial Sequence: Synthetic polynucleotide
  source 1..201: mol_type = other DNA
attatatatggtygggygygatggtttaygttatygagtgattgttgtaattttagtattttgggaggtygagaygggaggattaygaggttaggagatygagattattttggttaatayggtgaaatttygtttttattaaaaaaataaaaatattagtygggygtggtggtgggygtttgtagttttagttatttggga

SEQ ID NO: 15258 - DNA, 201 bp, synthetic construct
  misc_feature 1..201: note = Description of Artificial Sequence: Synthetic polynucleotide
  source 1..201: mol_type = other DNA
agttttagttattygggaggttgaggtaggagaatggygtgaattygggaggyggagtttgtagtgagtygagatygygttattgtattttagtttgggygatagagygagatttygttttaaaaaataaaaataaataataataataattttagatattttataataatttttaggtataagagtttttatgagagtagg

SEQ ID NO: 15259 - DNA, 201 bp, synthetic construct
  misc_feature 1..201: note = Description of Artificial Sequence: Synthetic polynucleotide
  source 1..201: mol_type = other DNA
tgggggttttagaatttttgtagtttatatttttttggtttttttttgggtagtttggaggttttygatttttyggagtttttggtatttgagttttttygtgaaagttygttygagaagggtttttgtttygggtttggtagattggagtttttttttgggttttttttttttttttttgggtgttttgtttttygttaa

SEQ ID NO: 15260 - DNA, 201 bp, synthetic construct
  misc_feature 1..201: note = Description of Artificial Sequence: Synthetic polynucleotide
  source 1..201: mol_type = other DNA
aygygttattaygttyggttaatttttgtatttttagtggagayggggttttattatgttggttaggttggttttaaattttttatttygtgattygttygtttyggttttttaaagtgttgggattataggagtgagttattatgttyggttttaattttagttttatagatgaaaaaayggaagtttaggattagtgat

SEQ ID NO: 15261 - DNA, 201 bp, synthetic construct
  misc_feature 1..201: note = Description of Artificial Sequence: Synthetic polynucleotide
  source 1..201: mol_type = other DNA
aagtagtatttggttttttgtttttgtgttaatttatttyggataatggtttttagttgtatttatgttgttgtaaaggatyggattttgttttttttaygattgtatagtattttatggtatatatatatatatattatatttttttaattyggtttatttatgtttttgttgttgtgaatagttttgtaatgaatatgt

SEQ ID NO: 15262 - DNA, 201 bp, synthetic construct
  misc_feature 1..201: note = Description of Artificial Sequence: Synthetic polynucleotide
  source 1..201: mol_type = other DNA
ttaaataaatgtygggtgttagggtygttgagtaagataataggtygtaaggaygtagtagaggattttyggtygatttgttgygatggagtgagttagyggtgaggtttgaaggtttttgttttatttttttttyggagtagaggtyggggagggtgttgggtgttagtatagagtagagggtyggttayggaattgggg

SEQ ID NO: 15263 - DNA, 201 bp, synthetic construct
  misc_feature 1..201: note = Description of Artificial Sequence: Synthetic polynucleotide
  source 1..201: mol_type = other DNA
gggagtgtagtggygygatttyggtttattgtaattttygtttttygggtttaagygatttttttgttttagtttttttagtaggtaggattatagtygygtgttattatattyggttaattttttgtatttttagtagagattgggttttattatgttagttagaatggttttaatttattgatttygtgattygttygt

SEQ ID NO: 15264 - DNA, 201 bp, synthetic construct
  misc_feature 1..201: note = Description of Artificial Sequence: Synthetic polynucleotide
  source 1..201: mol_type = other DNA
ttagtagaaatagggttttattatgttggttagaatggttttgattttttgattttgtgatttgttygtttygtttttttaaagygttgggattataggygtgagttattgygttttgtttattgtttatttttttttgttygttttattttgattgtyggggttttggatattatataaagagttagttggagagtgaga

SEQ ID NO: 15265 - DNA, 201 bp, synthetic construct
  misc_feature 1..201: note = Description of Artificial Sequence: Synthetic polynucleotide
  source 1..201: mol_type = other DNA
ggaatgtagtggygttatttygttgattgtatttttygtttttyggttgtaagtgatttttttgttttagtttttttagtagttgggattataggygtgygttataatatttagttaatttttgtatttttagtagagaygggtttttattaagttggttaggttggtttygaatttttgatttygtgattygtttgtttt

SEQ ID NO: 15266 - DNA, 201 bp, synthetic construct
  misc_feature 1..201: note = Description of Artificial Sequence: Synthetic polynucleotide
  source 1..201: mol_type = other DNA
tatttyggttttttaaagtgttggtgttataggtgtgaattatygtattyggtttgttttttattttattatttatttattttttttgagattgagtttygtttttgttgtttaggttggagtgtgtagtggtttaatttyggtttattgtaaatttygtttttygggtttaagygatttttttgttttagttttttgagt

SEQ ID NO: 15267 - DNA, 3238 bp, synthetic construct
  misc_feature 1..3238: note = Description of Artificial Sequence: Synthetic polynucleotide
  source 1..3238: mol_type = other DNA
ttttttttyggattggtttaatttttttttttaagtttggtattttgtttttttttagygggggatattttgtygttttggggtgttygtygtgggygtygtaygattttgggtgtaagttagagattttataaataygtygggttttgygtagyggttttygggaaggtattgttattygtgggagggttyggttygttattttttattttttgttgttttaaygttattttttaagtttggygtttttttttttttttttggaggttttygtgttgttttggggtgttttttgtgggygagatatataatttgggtgtaagttagggatttygygattatttttggttyggygtaggggtggttatttttgggaygatattatttygttatttttttttttggattgtttttattattttttttaattttggygttttgtattttttttttagtggtttttttgtygttttgtggtgtttttygtgggtgagataygtattyggggtgtaagatagggattttaggaygttttygggtttattgtagaggttgttgggaaggtagtgtygttygtgagaggattttagtattttygtttttttttttyggggttgttttaatttttttttttaagattgaygtgttgtttttttttttygggaatttttttgttgttttgtggtgttygtygtgggtaagatatttattttgggtgtaagttagggaattaataattttygtatgttyggtaaaggggttgtyggtaaggtattgttattygtgggattattttagtttygttgtttttttttttaggttatttaaaygtttttatttaagtttggygttttgttgttttttygygggggattttttgttattttggggtgtttttygtgggygagataygtatattgtgtgtaagatagggatttygygattttttygggattggtataggggttgtagggaaggtattgttattygtgaaaggattttagtttygttttttttttttttgggttgttttaaygtttttttttaagtttggtattttgttttttttttttyggggtttttttgttgttttggggtgttattygtgggygaggtaygtattttgggtgtaaattagggattttaagatttttagggttaggygtaggggatgtygggaagttattgtttttygtggaaagtttttttttggattgttttaaagtttttttttaagtttggtattttgtttttttttttyggagttttttttgtagttttygygtgtatatttaggygagataygtattttgttgtaagatagggattttaaattttttygtttgggttaggtttaggggttgtygggaaggtattgtggtttgtgggaygattatagtttagtygttgtttttttttggttggtttaaygtttttttttaagtttgatatgttgtttttttttttygggggttttgttgttatttttaygtgtatttygtgagtaagataggtattttgggtttaagttaggggttttatygtttatttgggttttatttagaggttgtygggaaggtattgtttttagtggaaatttttttttyggattgttttaaygtttttttttaagttyggygttttgtttttttttattyggggattttttatygtattgyggtgtttatygtgggtaygataygtatttygggtgtaagttagggattttataattattttaggttygatgtaggggttatyggataagatattgttgtttttgggatgatatyggtttgttttaattttattttttaattttggagttttgtattttttttttgggggtttttttgttgttttgtggtgttattygtgggygagatatataatttgggagtaagttagagattttaygatatttttgggtttattgtagaggttgttaggaaggyggtgttattygtgggaggattttagttttattatttttatttyggggtygttttaattttttttttaagtttgaygtgtttttttttttttygggaatttatttgtygttttggggtgtttttttgagygagataygtattttgggtgtaagttayggattttaggattattttggtttagygaaggggttgttaggaaggtattgtygtttgtgggagaaatttagygtygtygtttttttttaygggttattttaaagtttttttttaagtttgaggtgttgttttttttttttaggggtttatttgtygttttggggtgttttttatgggygaaataygtattttgggtgtaagatagggattttaygattttttygggtttagygtagggattgttaggaaggtattgttattygtaggaggaattygattagtygtttttttttttgtgttgttttagtatttttattaaagtttggttttttgtggygttygttyggyggtttttttgttattttggggtgtttttatgggtgygattygtattttyggtgtaagttagggattttaygattatttygggtttgaygtaggggttgttgggaaggtattgtygtttatgggaygattttagtttgttaygttttttttyggattgttttaattattttttttaattttggygttttatatttttttttyggtggtttttttgtygttttgtggtgtttttygagggygagataygtattttgggtgtaagttaaggattttatgaygtttttaggtttattatagatgttgtygggaagatagtgttattygtggtaggattttagtattttttttttattttyggggttgttttaaygtttttttttaagtttgaygtgttgttttttttttttgggaatttatttgtygttttggggtgtttttygtggaattttgggtgtaagtttgggatataataattttttygggtttggtaaaggggttgtygggaaggtatygtggttygtgggaagtttttttttggattgttttaaagtttttttttaagtttggygttttgttttttttttagggggtatttttgtygttttggggtgttttttygtgggygygataygtattttgggtttaagttaggaattttaygataatttygagtttggygtaggggttgtygggaaggtattgtygttygtgtgaygatygttgtttgttgttttttttttygtgttgttttaaygttattttttaygtttggygtttta

SEQ ID NO: 15268 - DNA, 201 bp, synthetic construct
  misc_feature 1..201: note = Description of Artificial Sequence: Synthetic polynucleotide
  source 1..201: mol_type = other DNA
tgttatttygttyggttaattttgtgtgtgtgtgtttttagtagagayggggttttatygtgttagttaggatggtttygattttttgatttygtgattygtttttttyggttttttaaagtgttgggattataggygtgagttatygygttyggttttttgtatattattttttgagatattttgaggtaatagttttgg

SEQ ID NO: 15269 - DNA, 201 bp, synthetic construct
  misc_feature 1..201: note = Description of Artificial Sequence: Synthetic polynucleotide
  source 1..201: mol_type = other DNA
ygaygtttaagtattygagaayggtgattaattattttggagagtatttgtaaaggyggttttttagtygtttttttyggaagtygtagtttttgtgttygttttygtattttgtatatttgttgaggtggggygtgttaattattaaattattaatgagtgatggtttaaattgtaggtagagtaatgaatagatggtgg

SEQ ID NO: 15270 - DNA, 201 bp, synthetic construct
  misc_feature 1..201: note = Description of Artificial Sequence: Synthetic polynucleotide
  source 1..201: mol_type = other DNA
tgtaataagttygggggttgattttgggygtgtygggggygagggggttayggtggagayggataygggygtggggyggtygagatttgtayggtttagygggtatyggtattgyggggttttygtttttagaggattattgttttatattgaagtttttttttttgtatatttagagtttgatgtatttttaattatygt

SEQ ID NO: 15271 - DNA, 201 bp, synthetic construct
  misc_feature 1..201: note = Description of Artificial Sequence: Synthetic polynucleotide
  source 1..201: mol_type = other DNA
gggygtggtggygggtatttgtaattttagttattygggaggttgaggtaggagaatggtgtgaattygggaggtggagtttgtagtgagtygagatygygttattgtattttagtttgggygatagagygagatttygttttaaaaaaaaaaaaaaaaaaaaagaagaagttagagtaaggaggtagaatgatttttagg

SEQ ID NO: 15272 - DNA, 201 bp, synthetic construct
  misc_feature 1..201: note = Description of Artificial Sequence: Synthetic polynucleotide
  source 1..201: mol_type = other DNA
ggttagggygtaygyggygttggggttyggggggatgttygttgtttyggtygtattttggttaygtatatttttgggggyggttgttttattgtagggygygggggyggagttyggtttaagaagagyggtaaagggygggyggttttggyggtttagtttagggttygggagtgtttgggggttttttygtttyggggg

SEQ ID NO: 15273 - DNA, 201 bp, synthetic construct
  misc_feature 1..201: note = Description of Artificial Sequence: Synthetic polynucleotide
  source 1..201: mol_type = other DNA
aaaaagtaaaaaataaaaattagtyggttatagtggtgggtgtttgtaattttaattgttygggaggttgagttaggataatagtttgattttgyggggyggaggttgttatgagttaaaatygtgttattttattttaggttgggygtaagagygagattttgttttaaaaaaaaaaaaaaagttttatgtygggygtyg

SEQ ID NO: 15274 - DNA, 201 bp, synthetic construct
  misc_feature 1..201: note = Description of Artificial Sequence: Synthetic polynucleotide
  source 1..201: mol_type = other DNA
taggygtgagttatygygttyggttatttttgataattttattttaaatagtgataggttaaaagttaagagyggatgttttagtatttagttttttagygttttgttagttattttaagtttgtygataggagtttgattttattgattttttttttttttagagttatgtttattttttaaaattttaagaagttgttt

SEQ ID NO: 15275 - DNA, 201 bp, synthetic construct
  misc_feature 1..201: note = Description of Artificial Sequence: Synthetic polynucleotide
  source 1..201: mol_type = other DNA
atttyggaggttgaggtaggagaatggygtgaaygygggaggtggagtttgtagtgagtygagatygygttttttgattttaggtgatttgtttgttttygtattyggttaatttgtttttgtatatataatttttttattgtttaatatattttagggttttttaattttatattttatattttagtttttttaatagat

SEQ ID NO: 15276 - DNA, 201 bp, synthetic construct
  misc_feature 1..201: note = Description of Artificial Sequence: Synthetic polynucleotide
  source 1..201: mol_type = other DNA
tagggtttygttgtgttggtygggtyggtttttagtttttaatygygagtgattygttaatttyggtttttygaggtgtygggattgtagayggagtttygtttatttagtgtttaatggtgtttaggttggagtgtagtggygtgatttyggtttattataatttatattttttagtygtttgttttggttttttaaaat

SEQ ID NO: 15277 - DNA, 201 bp, synthetic construct
  misc_feature 1..201: note = Description of Artificial Sequence: Synthetic polynucleotide
  source 1..201: mol_type = other DNA
aggtygaggtaggyggattataaggttagaatatygagattattttgggtagtaygatgaaatttygtttttattaaaaaatataaaaaattagtygggygtggtggtyggygtttgtagtattagttgtttaggaggttgaggtaggagaatggtatgaatttgggaggyggagtttgtagtgagtygagattgygttat

SEQ ID NO: 15278 - DNA, 201 bp, synthetic construct
  misc_feature 1..201: note = Description of Artificial Sequence: Synthetic polynucleotide
  source 1..201: mol_type = other DNA
ggtgggtgggttatgaggttaggatattgagattattttggttaatatggtgaaattttgtttttattaaaaatatagaaaattagttgggtatgttggtgggtatttgtaagttttagttatttgggaggttgaggtaggagaatggtgtgattttgggaggtggagtttgtagtgagttgagattatgttattgtattt

SEQ ID NO: 15279 - DNA, 208 bp, synthetic construct
  misc_feature 1..208: note = Description of Artificial Sequence: Synthetic polynucleotide
  source 1..208: mol_type = other DNA
tttatttatttatttttgagatagagttttgttttgttgtttaggttggagtgtagtggtgtgattttggtttattgtaagttttgttttttgggtttatgttatttggttttagttttttgagtagttgggattataggtgtttgttattatgtttggttaattttttatatttttagtagagatagggttttattatgttagttag

SEQ ID NO: 15280 - DNA, 201 bp, synthetic construct
  misc_feature 1..201: note = Description of Artificial Sequence: Synthetic polynucleotide
  source 1..201: mol_type = other DNA
ttttttttttttttttttttttttttgagatggagtttggttttgttgtttaggttggtgtgtagtggtttattgtattttttgttttttgggtttaagtgatttttttattttagttttttaagtagttggggttaaaggtttgtgttattatgtttggttaattttttgtattttagtagagatggggttttattgtgt

SEQ ID NO: 15281 - DNA, 201 bp, synthetic construct
  misc_feature 1..201: note = Description of Artificial Sequence: Synthetic polynucleotide
  source 1..201: mol_type = other DNA
ttgtggtgtaattttagtttattgtaatttttgttggtagggtttaagtaatttttttgttttagttttttgagtagttgggattataggtatgtattatgatgtttggttaatttttgtatttttagtagagatggggttttattatgttgattaggttggttttgaatttttgattttaggtgatttgtttattttggt

SEQ ID NO: 15282 - DNA, 201 bp, synthetic construct
  misc_feature 1..201: note = Description of Artificial Sequence: Synthetic polynucleotide
  source 1..201: mol_type = other DNA
gtgggttttaaatattttataagttagagtaattagaatagtatggtattggtataaagataggtatatagtttgtttggttttgttttgttttgttgttgtgtttgttagttatgagttttatgtagttaaataaaggtttttttgtggatttttggttgaggttaagaattggtttttgtttaaatatgatttttagaa

SEQ ID NO: 15283 - DNA, 201 bp, synthetic construct
  misc_feature 1..201: note = Description of Artificial Sequence: Synthetic polynucleotide
  source 1..201: mol_type = other DNA
tattgatttggaagaatggaatgatagttagtgaggtatatttagtaattgagtatggttagtgttggtttttggtttttgagatattgatttatgtagtgttaggatttggggattttttaggtgtaaattagaggttaaatagtttgtttggttaatgggttagaatttgtggttgaatagaggttttgttgtggtttt

SEQ ID NO: 15284 - DNA, 201 bp, synthetic construct
  misc_feature 1..201: note = Description of Artificial Sequence: Synthetic polynucleotide
  source 1..201: mol_type = other DNA
ttatttttgggggatgagaggagggatggtgagaggatatttttaaagaatatttggggttggggaagaattttttatgattttgttttataatttggttgtttattttgtattttgttgtatgttgtttggtttttggttatgttatgtgaatttttggagttattttttttttttttttatttggatggagagggtttt

SEQ ID NO: 15285 - DNA, 201 bp, synthetic construct
  misc_feature 1..201: note = Description of Artificial Sequence: Synthetic polynucleotide
  source 1..201: mol_type = other DNA
tttaatagatatgaaaattgaaggttgggtgtagtggtttaagtttgtaattttagtattttgggaggttgaggtgggtggattatgaggttaggagattgagattattttggttaatatagtgaaattttgtttttattaaaaatattaaaaattagttgggtgtggtggtgggtgtttgtagttttagttatttgggag

SEQ ID NO: 15286 - DNA, 201 bp, synthetic construct
  misc_feature 1..201: note = Description of Artificial Sequence: Synthetic polynucleotide
  source 1..201: mol_type = other DNA
ttgaatagttgggattataggtgtttgttattgtgtttggtttattttttgtgtgtttttagtagagatggggttttattgtgttagttaggatggttttgattttttgattttgtgatttgtttgttttggttttttaaagtgttgggattataggtttgagttattgtgtttggttaaaataattaatttttgtgttaa

SEQ ID NO: 15287 - DNA, 201 bp, synthetic construct
  misc_feature 1..201: note = Description of Artificial Sequence: Synthetic polynucleotide
  source 1..201: mol_type = other DNA
atggatttttgtggtgagtgttatagtttttaaaggtggtgtgtttggagtttgttttttttgatgtttggatgtgtttggagttttttttggtgggtttgtggttttgttggtttaggagtgaatttgtagatttttgtggtgagtgttatagtttataaaggtagtgtggatttatagagtgaatagtagtaagattta

SEQ ID NO: 15288 - DNA, 201 bp, synthetic construct
  misc_feature 1..201: note = Description of Artificial Sequence: Synthetic polynucleotide
  source 1..201: mol_type = other DNA
tattaaaaataaagaaggaggttgggtgtggtggtttatgtttgtaattttagtattttgggaggttgaggtgggtggtggattatgaggttaggagattgagattatggtgaaattttgtttttattaaaaatataaaaaattagttgggtgtggtggtgggtgtttgtagttttagttattgggaaggttgaggtagga

SEQ ID NO: 15289 - DNA, 201 bp, synthetic construct
  misc_feature 1..201: note = Description of Artificial Sequence: Synthetic polynucleotide
  source 1..201: mol_type = other DNA
gttaagatagtgttattgtattttagtttgggaatagagtgagattttgttttaaaaaaaaattattgatatatataaatatttgtgaaattggttgggtgtggtggtttatgtttgtaattttagtattttggggggttgaggtgggtgtattataaggttaggagattgagattattttggttaatatggtgaaatttt

SEQ ID NO: 15290 - DNA, 235 bp, synthetic construct
  misc_feature 1..235: note = Description of Artificial Sequence: Synthetic polynucleotide
  source 1..235: mol_type = other DNA
gtttatagtttttagagagagtgatgtagaagatgggtgatttttgtatttttatttgaggtattgggtttattttattagggagtgttagatagtgggtgtaggttagtgggtgtgtgtattttgtgtgagttgaagtagggtgaggtattgttttattttggaagtataaggggttagggagtttttttttttagttaaagaaaggggtgatagatggtatttggaaaattgg

SEQ ID NO: 15291 - DNA, 201 bp, synthetic construct
  misc_feature 1..201: note = Description of Artificial Sequence: Synthetic polynucleotide
  source 1..201: mol_type = other DNA
ttttgagtagttggtgttataggtgtttattattatgtttggttaattttttgtatttttagtagagatagggttttattatgttagttaggatggttttgattttttgattttgtgatttgtttgttttggttttttaaagtgttgggattataggtatgagttattgtggttggttttaattatgtatttttatttatt

SEQ ID NO: 15292 - DNA, 201 bp, synthetic construct
  misc_feature 1..201: note = Description of Artificial Sequence: Synthetic polynucleotide
  source 1..201: mol_type = other DNA
ttgattatttaggtgtgtttgttatttttttttttgatttggaaagggaattttttgtttttttgtgttttttaagtgaggtaatgttttgttttgttttggtttgtgtatggtgtatgtatttattgatttgtgtttattgtttggtattttttagtgagatgaatttggtattttagatggaaatgtagaaattatttg

SEQ ID NO: 15293 - DNA, 201 bp, synthetic construct
  misc_feature 1..201: note = Description of Artificial Sequence: Synthetic polynucleotide
  source 1..201: mol_type = other DNA
tgggttgttgggtgtttgggttgtttttttattgtttaggataaattttattttgttttattggttgatggtttgttggggagtttgtgggtgagttggtgtttgtaggtgtgtttttttgttgatatgttttttgtgattagttgtttttgtttttttttattgatgtgttttttttgttttttagtagtttttgttttt

SEQ ID NO: 15294 - DNA, 201 bp, synthetic construct
  misc_feature 1..201: note = Description of Artificial Sequence: Synthetic polynucleotide
  source 1..201: mol_type = other DNA
tatttggtttggagggttttatgtttattgagttttgttgattgttagtatagtagtttgagattaaattgtaaggtagtagtgaggttgggggaggggtgtttgttattgtttaggtttgtttaggtaaataaagtagttgggaagtttgaattgggtggagtttattatagtttaaggaggtttgtttgtttttgtagg

SEQ ID NO: 15295 - DNA, 201 bp, synthetic construct
  misc_feature 1..201: note = Description of Artificial Sequence: Synthetic polynucleotide
  source 1..201: mol_type = other DNA
ttgttttgtagtttgattttagattgttgtgttagtaattagtgagattttgtgggtgtaggattttttgagttaggtgttggatataatttttaggtgtgttgttttttaagtttgttggaaaagtgtagtattttggtgggagtgatttgattttttaggtgttttttgttatttttttttttgattaggaaagggaat

SEQ ID NO: 15296 - DNA, 201 bp, synthetic construct
  misc_feature 1..201: note = Description of Artificial Sequence: Synthetic polynucleotide
  source 1..201: mol_type = other DNA
agtgatgtagaagatgggtgatttttgtatttttatttgaggtattgggtttattttattaagggagtgttagatagtgggtgtaggttagtgggtgtgtgtattgtgtgtgagttgaagtagggtgaggtattgttttatttgggaagtataaggggttagggagttttttttttgagttaaagaaaggggtgatggatg

SEQ ID NO: 15297 - DNA, 201 bp, synthetic construct
  misc_feature 1..201: note = Description of Artificial Sequence: Synthetic polynucleotide
  source 1..201: mol_type = other DNA
tattaggatattttggttgtagagaggagttatttattgtgagttttttttgagttgttttattatttagtaaagtttttttttattttgtttattttttgtttgtttatgtatgttattgtttttgggtgttgaatttgttaaatggtggaggtgaaagagttttaatataaatagagttgaaatatgttttttgtttgt

SEQ ID NO: 15298 - DNA, 201 bp, synthetic construct
  misc_feature 1..201: note = Description of Artificial Sequence: Synthetic polynucleotide
  source 1..201: mol_type = other DNA
gttggagtgtaatggtatgattttggtttattgtaatatttgttttttgggatttagtaatttttttgttttagttttttgagtagttgagattataggtgattattattatgtttggttgatatttgtatttttagtagagatggggttttattatgttggttaggttggttttgaatttttgattttaggtgatttgtt

SEQ ID NO: 15299 - DNA, 201 bp, synthetic construct
  misc_feature 1..201: note = Description of Artificial Sequence: Synthetic polynucleotide
  source 1..201: mol_type = other DNA
tattgttggtattagtatttggaagaggggaatattgtggtttttgaaaatttggagttgttagtaattgaggagttttaaggagtgagatgggggtgttgttttattatttttttatttttgtagttggtagttttgttagtggtgggggttgggttgaggggtggtggtatattaggggggtggtggtatatattatag

SEQ ID NO: 15300 - DNA, 201 bp, synthetic construct
  misc_feature 1..201: note = Description of Artificial Sequence: Synthetic polynucleotide
  source 1..201: mol_type = other DNA
gttttttggtattattagtatttgggttttttggagtggaagtggttggttggggatatgtagtttatagaggtttagatgaaaatttggttttaaaattgttagatgaaatatgaatggtaaatgtaggatttatagttgaatagtttttttttggggtttttttatgtgtttgggttttttatttattgttttttggtt

SEQ ID NO: 15301 - DNA, 207 bp, synthetic construct
  misc_feature 1..207: note = Description of Artificial Sequence: Synthetic polynucleotide
  source 1..207: mol_type = other DNA
attagagtagaggggtttttttattttttgtttagttttttgatttggttttttattttttaggaaatatattttggtttgaggtttatttgttgttgttgttgttggaggagttggttttgaatgagttggtgatgttgatgtgtttggtatgtggttttagttttaaggatgtgttggtttgttggttgtaggggttataggagt

SEQ ID NO: 15302 - DNA, 201 bp, synthetic construct
  misc_feature 1..201: note = Description of Artificial Sequence: Synthetic polynucleotide
  source 1..201: mol_type = other DNA
atattaggggaagaagatataagtgttggttatttataggagtattttagtagaaggatatgttgataggtatttggaagttagtaggttgtggattagtgggaggaggtggaggttggtttgggtagttaggggagagttggggttgttgagtattttaattttaggggaaaattattttttttttggttgttttatggg

SEQ ID NO: 15303 - DNA, 201 bp, synthetic construct
  misc_feature 1..201: note = Description of Artificial Sequence: Synthetic polynucleotide
  source 1..201: mol_type = other DNA
ttgattttttaggtgtgtttgttatttttttttttgatttggaaagggaattttttgattttttgtgttttttaagtgaggtagtgttttgttttgttttgtgtatggtgtatgtatttattgatttgtgtttattgtttggtattttttagtgagatgaaattggtattttagatggaaatgtagaaattatttgttttt

SEQ ID NO: 15304 - DNA, 201 bp, synthetic construct
  misc_feature 1..201: note = Description of Artificial Sequence: Synthetic polynucleotide
  source 1..201: mol_type = other DNA
ttatgttttaggtatattgatatttttgtattggttttttttaggaggttatgttttaggtatatgggtatttttatattgattttttttagtaggttatgttttaggtatatgggtatttttatattgattttttttgggaggttatgttttaggtatatgggtatttttatattggttttttttaggaggttatgtttt

SEQ ID NO: 15305 - DNA, 201 bp, synthetic construct
  misc_feature 1..201: note = Description of Artificial Sequence: Synthetic polynucleotide
  source 1..201: mol_type = other DNA
gtttttttgtttggttgtttagtttgggaagtgaggagtgtttttttttggttgttattttgtttaggaagtgaggagtgtttttgtttggttatttattgtttgggatgtggggagtatttttgttaggttgtgattttatttgggaattgaggagtgtttttgttttgttattattttatttgggaggtgaggagtgtt

SEQ ID NO: 15306 - DNA, 201 bp, synthetic construct
  misc_feature 1..201: note = Description of Artificial Sequence: Synthetic polynucleotide
  source 1..201: mol_type = other DNA
gagggagatgtggggtgggaattggggttgtttgtggtaggttagagtaagttttgggtggatatggttttggtgggttttatattttgagtagttggttgttttattagttttgggtagtgaggggtttattatttgggatagtagttgtggagggtgtgttgagttttttagtagtgttagtttgttggtgttgtgttc

SEQ ID NO: 15307 - DNA, 201 bp, synthetic construct
  misc_feature 1..201: note = Description of Artificial Sequence: Synthetic polynucleotide
  source 1..201: mol_type = other DNA
tttgattaaaaataaataaatatggttgggtgtggtggtttaggtttgtaattttagtattttgggaggttgaggtggtggattataatgttaggagattgagattattttggttaatatggtgaaattttatttttattgaaaatataaaaaattagttgggtgtggtggtgggtatttgtagttttagttatttaggag

SEQ ID NO: 15308 - DNA, 201 bp, synthetic construct
  misc_feature 1..201: note = Description of Artificial Sequence: Synthetic polynucleotide
  source 1..201: mol_type = other DNA
tggttagggggtatttttagatgtatagaagttttggaggttatggtaagtttgtaattgggatttgtttttaggtttatatgtgtagttttttagttgtgtaatttttttaaatggagtagttttggtgtgggtggggtttgggttggtagtgggggtggggttggtagtgggggtggggttagttgggggaggaggggg

SEQ ID NO: 15309 - DNA, 201 bp, synthetic construct
  misc_feature 1..201: note = Description of Artificial Sequence: Synthetic polynucleotide
  source 1..201: mol_type = other DNA
tatggtgaaattttatttttattaaaaatataaaaattagttgggtgtggtagtgtatgtttgtaattttagttatttgggaggttgaggtaggattattgtttgaatttggaaggtggaggttgtagtgaattaagagagtggttttgtattatagtttgaatgatagagtaagattttattttaaaataattaattaat

SEQ ID NO: 15310 - DNA, 201 bp, synthetic construct
  misc_feature 1..201: note = Description of Artificial Sequence: Synthetic polynucleotide
  source 1..201: mol_type = other DNA
attatgtttggttaattttttttttttgtatttttagtagagatggggttttattgtgttagttaggatggttttgattttttgattttataatttgtttgttttggttttttaaagtgttgggatgataggtgggagttattgtgtttggtttaatttagtgtttgatatttgaagatgatttgggttagaggagattgt

SEQ ID NO: 15311 - DNA, 201 bp, synthetic construct
  misc_feature 1..201: note = Description of Artificial Sequence: Synthetic polynucleotide
  source 1..201: mol_type = other DNA
agtgagttgttgatgttagtgagatgttaggttggatttagtaagttgttgatgttagttagatgtagagtagagaatgttggttaaagagtagttaggtggtgtttgtttggttgaagtttagttttggagaggtaggttttgtattaggatgtggaggttttggggttatgaaatttttagggtgagagataaaggtag

SEQ ID NO: 15312 - DNA, 380 bp, synthetic construct
  misc_feature 1..380: note = Description of Artificial Sequence: Synthetic polynucleotide
  source 1..380: mol_type = other DNA
tttttttttttttttttagatggagtttagttttgtttttatgttgtagggtagtggtgtggttttggtttattgtaatttttgttttttgggtttttgtgatttttttgttttagttttttgagtagttgggattataggtatatgttattatgtttagttaatttttgtttgtttgtttatttatttattattatttttgagatggagttttgttttgttattaggttggagtgttattggagtgtaatggtatgattttggtttattgtaatttttgttttttgggtttaagtaatttttttgttttagttttttgtgtaattgggattataggtatgtgttattatttttagttaattttttgtattttagtagag

SEQ ID NO: 15313 - DNA, 201 bp, synthetic construct
  misc_feature 1..201: note = Description of Artificial Sequence: Synthetic polynucleotide
  source 1..201: mol_type = other DNA
gagtgtaatggtgtgattttggtttattgtaagttttgttttttgggtttatgttatttttttgttttagttttttaagtagttgggattagaggtgtttgttgttatgtttagttaattttttgtatttttagtagagatggggttttattgtattagttaggatggttttgattttttgattttgtgatttgtttgttt

SEQ ID NO: 15314 - DNA, 201 bp, synthetic construct
  misc_feature 1..201: note = Description of Artificial Sequence: Synthetic polynucleotide
  source 1..201: mol_type = other DNA
tatagggtgttgaaattaagttatttagggagtttgtagattttattttttttggtgagagagtttggtggggagtattttatttaatgtagggaatagtgttattgtggtttttattttttggttttaagtgatttatttgttgtagttttttaagtagttgggattataggtgtgtgttattatgttgggttagttttt

SEQ ID NO: 15315 - DNA, 201 bp, synthetic construct
  misc_feature 1..201: note = Description of Artificial Sequence: Synthetic polynucleotide
  source 1..201: mol_type = other DNA
ttttttttttgggggtttttttatgttttatgtagtttatggtgtggggtttattggttttggtggggtggaaggttttatgttgttgttgttttatgttgttggtggtgggggtttgttgggggttgggaggaaggtaaataggaagggtttattggggagagggtgggggagtatgttatagttgttgtagtttgttgt

SEQ ID NO: 15316 - DNA, 201 bp, synthetic construct
  misc_feature 1..201: note = Description of Artificial Sequence: Synthetic polynucleotide
  source 1..201: mol_type = other DNA
tttaggtgtgtttgttatttttttgatttggaaagggaattttttgattttttgtgttttttaagtgaggtaatgttttattttgttttggtttatgtatggtgtgtgtatttattgatttgtgtttattgtttggtattttttagtgagatgaatttggtattttagatggaaatgtagaaattatttgttttttgtgtc

SEQ ID NO: 15317 - DNA, 201 bp, synthetic construct
  misc_feature 1..201: note = Description of Artificial Sequence: Synthetic polynucleotide
  source 1..201: mol_type = other DNA
ggttgtagtgtagtggtgtgatttttgtttattgtaagtttttttttttgggtttatgttatttttttgttttagtttttgagtagttgagattataggtgtttgttattatatttggttaattttttgtaaaaaatttaaaaaaaaaattaaagataaaatgggtttggtagtatgatattttttatttttaattatttg

SEQ ID NO: 15318 - DNA, 201 bp, synthetic construct
  misc_feature 1..201: note = Description of Artificial Sequence: Synthetic polynucleotide
  source 1..201: mol_type = other DNA
ttttgttttttttaagtgttggttaggttgagaaataaagggatagagtataaaagagggaaattttaaagttgggtatttgggggagatattatatgttggtaggttttgtgatgtttttgagttgtaaaattagtaagtttttattagggatttttaaaaggggagggagtgtatgaatagggtgtgggttatagagat

SEQ ID NO: 15319 - DNA, 201 bp, synthetic construct
  misc_feature 1..201: note = Description of Artificial Sequence: Synthetic polynucleotide
  source 1..201: mol_type = other DNA
agtagtgtttttataaataggtgtgaaaattgagtatgttttgggttggttagttgaattattgtgtgtagagagggagttttggttgtataggtatagtggtggattatgtttttatatatgttgtttgtatagaaaatggagaataagtttttttttgggttgggtttttaagattataataataagagtttgttaaag

SEQ ID NO: 15320 - DNA, 201 bp, synthetic construct
  misc_feature 1..201: note = Description of Artificial Sequence: Synthetic polynucleotide
  source 1..201: mol_type = other DNA
ttttaggggttttaaattggagttttatttttaggatttataaaattttagatatagttaggatttgttagggagattagttttttttggtagtttgggtgttgttgtttttaatatatagtgataatttggaatttatttttagagttatttagaaatatgttttggagatggtgttttttgaaagatttttatttttaa

SEQ ID NO: 15321 - DNA, 201 bp, synthetic construct
  misc_feature 1..201: note = Description of Artificial Sequence: Synthetic polynucleotide
  source 1..201: mol_type = other DNA
ggatgtttggttatatttgattttttatttttgggtatggaggtttgtttgtagaggtttgggtttgggtataaagggagagagaggtttttattgttttgtaggggttgaaatgtagattgtgtatttttggtgattttggggatttttttttgattattaggatttttttggattttagggtttttgttttgtttaggt

SEQ ID NO: 15322 - DNA, 201 bp, synthetic construct
  misc_feature 1..201: note = Description of Artificial Sequence: Synthetic polynucleotide
  source 1..201: mol_type = other DNA
ttagtagagatggggttttattgtgttagttaggatggttttgattttttgattttgtgatttgtttgttttggttttttaaagtgttgggattataggtgtgagttattgtgtttggttatttattttttttaagagatggttgatatgattttaatttttttaaatttttgaagatttgttttgtgatttagtatgtga

SEQ ID NO: 15323 - DNA, 568 bp, synthetic construct
  misc_feature 1..568: note = Description of Artificial Sequence: Synthetic polynucleotide
  source 1..568: mol_type = other DNA
aggtggagttgtttgttagtttggtgttgtgtgtttgtattttttagtttttgggtagttgatgggattgggtgttgtggaataggggttggtgtttgttggggaggtttgggttgtataggagtgtatggtgggggtggaggtttaggtatggagggttgtaggttttgagttttgtttggtggggaggtagttaaggtttagtgagaagttgagtatagtagttgttggtttaggtgttaagttttttattgtttgggttggttggttgttttgagtgtggggtttgttaagtttatgtttatttggaatttgagttggtttgtaagtgtagtttgtagttatggtttttgtttatgtttttttttttatatttatttgtaagttgagggagttggttttagttttgtttagtttagaaaggggtttttatagtgtagtgatgggttgaagggttttttaaatgtggttagagtgggtgttaaggttgaggaggtgttgagagggagtgagggttgtgagggttgttagtatgttgttattttttatttttgtgtttgtatattaa

SEQ ID NO: 15324 - DNA, 201 bp, synthetic construct
  misc_feature 1..201: note = Description of Artificial Sequence: Synthetic polynucleotide
  source 1..201: mol_type = other DNA
ttttttttttttttttttttttttttttttttgagatggatttgtgttttgttgtttaggttggagtgtagtggtgtgatttttgtttattgtaagttttgttttttgggtttatgttatttttttgttttagttttttgagtagttgggattataggtatttattatgatgtttagttaattttttgtatttttagtaga

SEQ ID NO: 15325 - DNA, 201 bp, synthetic construct
  misc_feature 1..201: note = Description of Artificial Sequence: Synthetic polynucleotide
  source 1..201: mol_type = other DNA
attttagagaagtttatgggagttttagggagagttttttttgtgaagggtagggtattttggaatgggtttgttgagtttgtttttatttggaatttatgtttgtttataagtgttttatatagttttggtttttatttgtgtttttttttttatatttttttgtaagtagagggagttaattttggttttggttagttt

SEQ ID NO: 15326 - DNA, 201 bp, synthetic construct
  misc_feature 1..201: note = Description of Artificial Sequence: Synthetic polynucleotide
  source 1..201: mol_type = other DNA
ggataaagaaaatgtggtatatggttgggtatggtggtttatgtttgtaattttggtattttgagaggttaaggtgggtagattatgaggttaggagattgagattattttggttaatatgatgaaattttatttgtattaaaaaatataaaaaattagttaggtatggtggtgggtgtttgtagttttagttatttggga

SEQ ID NO: 15327 - DNA, 201 bp, synthetic construct
  misc_feature 1..201: note = Description of Artificial Sequence: Synthetic polynucleotide
  source 1..201: mol_type = other DNA
ttgtattttagtttgggggatagagtgagattttgttttaaaaaagaaagaaaaaaatgtttttttttttttgttttttttgatttttattttgttttgtgggttttttattaataattgtttgtgtttgatttgggtgttttttttattataattttttttttaggtgtatgtttttataataaagtttattttatggtt

SEQ ID NO: 15328 - DNA, 201 bp, synthetic construct
  misc_feature 1..201: note = Description of Artificial Sequence: Synthetic polynucleotide
  source 1..201: mol_type = other DNA
ttagttttatttatgtgttatttatggataagggtaattattagtagtagtgattatgtgtgttaggtatttgtaggtttttttttgttttttgaattatgtgttatgtttagtttagggatgataaattgaggtgtatgagtaggtgagaagatgaatagtgtatttgggtaaggttgttagtttttttgtgtttttgtg

SEQ ID NO: 15329 - DNA, 201 bp, synthetic construct
  misc_feature 1..201: note = Description of Artificial Sequence: Synthetic polynucleotide
  source 1..201: mol_type = other DNA
ttattattgatatttattttttttttatttatagtatttgtatgtatgttaagaattggattggtaagagtgagtttagtaatgagtttattattatggtggatgaggtaggtatgtgggattgggtggaattttgttttagaggagtttgggagttaatttttgagggtttagatgtttaaatgtagaagtagatttttg

SEQ ID NO: 15330 - DNA, 201 bp, synthetic construct
  misc_feature 1..201: note = Description of Artificial Sequence: Synthetic polynucleotide
  source 1..201: mol_type = other DNA
gtgggaggtgtgtaagtgatatattgaggggtttaggtagtagtttttatatgttgttaggttagagtagttttgggttatgtgggtgtttttagttgttgttgtaggtggaggtatgttggttttttaaggatgtgatagtggttggatttttatgattattgtttggttattagagggtaagttttagggttagttaag

SEQ ID NO: 15331 - DNA, 201 bp, synthetic construct
  misc_feature 1..201: note = Description of Artificial Sequence: Synthetic polynucleotide
  source 1..201: mol_type = other DNA
gggttggttttgggttgtttggggtttttgtgatttttatatttattttttttgtagggtgtggtgttgggttttatggtgggttttatgatttatgggtggtgttaattttagtttttggatatgatgatgtggtgtttgattttgtttttttgtgaggttttggttaagttaattatgttggtggatgttgatgttgag

SEQ ID NO: 15332 - DNA, 201 bp, synthetic construct
  misc_feature 1..201: note = Description of Artificial Sequence: Synthetic polynucleotide
  source 1..201: mol_type = other DNA
taatattgtttgtaaatgattgaattggtttttgatttttttagagaagattgtgtatagatatttggatgattttattagttaggaaattgagtggggtgggatgtatttgtagtagtggttggatagtgtgattatgtaggatggatggtttagatggttatgttgtagtttattagtagtaggtttttaaggtgatta

SEQ ID NO: 15333 - DNA, 201 bp, synthetic construct
  misc_feature 1..201: note = Description of Artificial Sequence: Synthetic polynucleotide
  source 1..201: mol_type = other DNA
ttggatagtaaatatgtgtgggttttttttgtgttggatagtaaatatgtgtgggtttttttgtgttaaatggtaaatatgtgtgggttttttgtgtgttgaatagtaaatatgtgtgggttttttttgtgtttgatagtaaatatgtgtgggttttttgtgtgttggatgataaatatgtatgggtgttttgtgtgttgg

SEQ ID NO: 15334 - DNA, 201 bp, synthetic construct
  misc_feature 1..201: note = Description of Artificial Sequence: Synthetic polynucleotide
  source 1..201: mol_type = other DNA
gttttattatgttggttaggttggtttttttaatttttgattttgtgatttatttattttggttttttaaagtgttgggattataggagtgagttattgtgtttggttgagatttttatgttattattttatgaagtttttggtataatgtttgatatatagtaggtatttgataagtggagtttttattgttgttttttt

SEQ ID NO: 15335 - DNA, 201 bp, synthetic construct
  misc_feature 1..201: note = Description of Artificial Sequence: Synthetic polynucleotide
  source 1..201: mol_type = other DNA
gagttaggtgtgggatatagttttgtggtgtgttgttttttaagtttgttggaaaagtgtagtatttgggtgggagtgatttgattttttaggtgtgtttgttatttttttttttgattaggaatgggaattttttgattttttgtgttttttgagtgaggtaatgttttgttttgttttggtttgtgtatggtgtgtgta

SEQ ID NO: 15336 - DNA, 201 bp, synthetic construct
  misc_feature 1..201: note = Description of Artificial Sequence: Synthetic polynucleotide
  source 1..201: mol_type = other DNA
ttttttggagttaattgtgtttttattattttaaatagagtagttgggattgggtgttgtgttttatgtttataattttagtattttgtgaggttgaggtgggtagattatgaggttaggagattgagattattttggttaatatggtgaaaatttgtttttattaaaaatataaaaaattttttgggtgtggtggtgggc

SEQ ID NO: 15337 - DNA, 201 bp, synthetic construct
  misc_feature 1..201: note = Description of Artificial Sequence: Synthetic polynucleotide
  source 1..201: mol_type = other DNA
ttgatagagtgaaatggtggtggtggttgggatgatgttgttgggtttgttataggtgggtgggtaggtgttgggttaggtgatggaggaggtggtaggtggtaattttttgtttatgttgttgattgtttgtgtttttatttttagtttggtttatttgttttgttttgttgttggttatttggtttagttgattgtagg

SEQ ID NO: 15338 - DNA, 201 bp, synthetic construct
  misc_feature 1..201: note = Description of Artificial Sequence: Synthetic polynucleotide
  source 1..201: mol_type = other DNA
gtgaaattttgtttttattaaaaatattaaaaaaattagttggtgtggtggtaggtgtttgtagttttagttatttgtaaagttgaggtaggagaatggtgtgaatttgggaggtggagtttgtagtgagttgagattgtgtttttgtattttagtttgggtgatagagtgagattttgttttaaaaaaaaagtagtttgg

SEQ ID NO: 15339 - DNA, 201 bp, synthetic construct
  misc_feature 1..201: note = Description of Artificial Sequence: Synthetic polynucleotide
  source 1..201: mol_type = other DNA
tttttatttttgtttttgagatggagttttatttttatttaggttggagtgtagtagtatgatttgggtttattgtaatttttgttttttgggtttagttgatttttttgttttagttttttaagtggttggaattataggtatatattattatatttggtaaatttttttttttttttttttgtatttttagtagattgt

SEQ ID NO: 15340 - DNA, 201 bp, synthetic construct
  misc_feature 1..201: note = Description of Artificial Sequence: Synthetic polynucleotide
  source 1..201: mol_type = other DNA
tatggtgaaattttgattttgttaaaaatataaaaattagttgggtgtggttgtgagtatttgtaattttagttatttgggaggttgaggtaggagaattgttagaatttgggaggtggaggttgtagtgagttaagatggtattattgtattttagtttgggtaatagagtgagattttattttaaaataaaaaaaaata

SEQ ID NO: 15341 - DNA, 201 bp, synthetic construct
  misc_feature 1..201: note = Description of Artificial Sequence: Synthetic polynucleotide
  source 1..201: mol_type = other DNA
atttgttttaaggattggaagaggaaaattaaaaatattatttgaaaggttggatgtggtggtttatatttgtaattttagtattttgggaggttaaggtgggtggattatgaggttaggagtttgagattagtttggttaatataatgaaattttgtttttattaaaaatataaaaattagttgggtttggtggtaggta

SEQ ID NO: 15342 - DNA, 201 bp, synthetic construct
  misc_feature 1..201: note = Description of Artificial Sequence: Synthetic polynucleotide
  source 1..201: mol_type = other DNA
tgtagtggtataatttttgtttttgtaattttttttttttggttttaagtgatttttgtgttttagtttttaagtagttgggattataggtttgagttttgtttggttaattttttttatatttttagtagagatggggttttattatgttggttaggttggttttgaatttttgattttaagtgatttgtttattttggt

SEQ ID NO: 15343 - DNA, 201 bp, synthetic construct
  misc_feature 1..201: note = Description of Artificial Sequence: Synthetic polynucleotide
  source 1..201: mol_type = other DNA
aatatgggtggttttgtgtaggatgggggttttagggttgtttgagttggaggatagtttgtagtttttattgtttgtagttgaagtgtgttgtgagattgttgtaggggtttgggttatttttgttttgggggattttaaaaagttgagttatatttatgttgaaatttttattgaggataattatgtattatatagatt

SEQ ID NO: 15344 - DNA, 201 bp, synthetic construct
  misc_feature 1..201: note = Description of Artificial Sequence: Synthetic polynucleotide
  source 1..201: mol_type = other DNA
agtttttgttgattttagtatgagttgtttatatatatttaaggttggtagtatagtggtatatgtggtaaaattgagtaggtgtggatgggaagggagtgtattagtttgtgtgtgaaggttatatttaggggtggagggaggggagaaatatttttgttgtatttgtagtgttttattttttttagtaatttaaaatgt

SEQ ID NO: 15345 - DNA, 234 bp, synthetic construct
  misc_feature 1..234: note = Description of Artificial Sequence: Synthetic polynucleotide
  source 1..234: mol_type = other DNA
ttttgttgatgtagtgtttgttgttgtttttggatgattttagtggtgaagtggtgtattatgttataggtttgttggaatttttgtttatttgttgagtggtagtaaatgaagttgaggtagtggtgtaagtgatattggtgttggatagatagagtgtttagtttaatgatagtggagatataattatttatttttttgttaaggagaaggggatttatgagtgtagttttt

SEQ ID NO: 15346 - DNA, 201 bp, synthetic construct
  misc_feature 1..201: note = Description of Artificial Sequence: Synthetic polynucleotide
  source 1..201: mol_type = other DNA
tagtttttttatttgtgtagtgggtgtaatgttgatgattgtttttgggaagttagatggtgtttgggaggtgttgagttggggttgatatagagtgagtgttttgtgaagtatttgggttttgtgatgtttttaagtttatagatgtattatgttatgaggaatatatttgggttggtgatgttggagataagggatttt

SEQ ID NO: 15347 - DNA, 201 bp, synthetic construct
  misc_feature 1..201: note = Description of Artificial Sequence: Synthetic polynucleotide
  source 1..201: mol_type = other DNA
tagtgagtatagattgtgttattgtattgtagtttgggtgatagaagtgaaaagaaatattgttttaaaaaaaaaataggagggaggagttaagatggttgaataggaatagttttggtttatagtttttagtgtgagtgatgtagaagatgggtgatttttgtatttttatttgaggtattgggtttattttattaggga

SEQ ID NO: 15348 - DNA, 201 bp, synthetic construct
  misc_feature 1..201: note = Description of Artificial Sequence: Synthetic polynucleotide
  source 1..201: mol_type = other DNA
gatgaaattttgtttttattaaaaatataaaaatttagttgggtgtggtggtggatgtttgtagttttagttatttaggaggttgaggtaggtgaatggtgtgaatttgggaggtggagtttgtagtgagttgagattgtgttattgtattttagtttgggtgatagagtgagattttgttttaaaaataaaataaaatta

SEQ ID NO: 15349 - DNA, 201 bp, synthetic construct
  misc_feature 1..201: note = Description of Artificial Sequence: Synthetic polynucleotide
  source 1..201: mol_type = other DNA
gtgagtgtggggtttagttggttgttttaagtattggtatataggtaggttttaggtagggtttgtagttggattaggtatgttattttgaagggaatgtggtggtattttaagaggggtgtttagattttgaagttttggaaggggtgattttatttgttaattagtttttttagttttgttatttgtagttttagggat

SEQ ID NO: 15350 - DNA, 201 bp, synthetic construct
  misc_feature 1..201: note = Description of Artificial Sequence: Synthetic polynucleotide
  source 1..201: mol_type = other DNA
gtgtggttttttagttagggtagtttgaaatttaggaatgttttaaggttattttgtgggaattgtggtgttagggtttttgaatatttttttgttttttgagttgagttgttttatttgttttttaaatgggttttgggaggaaggtttgtgtgtttttttaaggtgaggagttattgatgtaaattttttgtaaggatt

SEQ ID NO: 15351 - DNA, 201 bp, synthetic construct
  misc_feature 1..201: note = Description of Artificial Sequence: Synthetic polynucleotide
  source 1..201: mol_type = other DNA
ggggatttagtttatgtgtgtgggggttgtgtgtgtttgttttgtttgtttatgtatgttatatatgtgagagtttatagtgagggtagtttttatatgtgatggtttagaggagtgagtattttaggttttttagtatgtttttgtgttgattttttgtagtattgttgggagttatgtgagtgtttatgtttgtgtgtg

SEQ ID NO: 15352 - DNA, 201 bp, synthetic construct
  misc_feature 1..201: note = Description of Artificial Sequence: Synthetic polynucleotide
  source 1..201: mol_type = other DNA
tttatttgttttttgtttttttttttgttggatttgaggtgttgtttttgttgtgttgtttttgtgttatgttatgttatgttatgttatgttatgttatgtttttatgttatgtttatgttatgtttttattttttgtttatagggaaatgggttttggtgatgtgagggtgtttgttgtgtttggtgtttttatagggg

SEQ ID NO: 15353 - DNA, 201 bp, synthetic construct
  misc_feature 1..201: note = Description of Artificial Sequence: Synthetic polynucleotide
  source 1..201: mol_type = other DNA
agtttttaaagttttaatttttttttttttttttttttttttttttttttttttttgagttggagttttattttgttgttaggttggagtgtagtggtgtgattttagtttattgtaatttttgtgttttgggtttaagggatttttttgttttagttttttgagtagttgagattgtaggtatgtgttattatgtttagt

SEQ ID NO: 15354 - DNA, 201 bp, synthetic construct
  misc_feature 1..201: note = Description of Artificial Sequence: Synthetic polynucleotide
  source 1..201: mol_type = other DNA
ttgtaggatagttttaaaaaggaaggttattttttttttgtttattattgtagtttgttaattaattagaaggtaggtgttgagatagtaataattagttgatagttgtggaggattgttgggatttttatagagtttgataagtgggattatagttattattagttattgagaagagtgttttttatttatagagtgtaa

SEQ ID NO: 15355 - DNA, 201 bp, synthetic construct
  misc_feature 1..201: note = Description of Artificial Sequence: Synthetic polynucleotide
  source 1..201: mol_type = other DNA
ttaaatttttagagggtttattgtaagattttttttgggtttgaaagtttaagatgaataatttttttttttttaggtttagttttaaggtgtaatttgtgttagtagggtgtgttagtagggtgtgttagtagggtgtgttagtagggtgtgttagtagggtgtgttagtagggtgtgttagtagggtgtgttagtaggg

SEQ ID NO: 15356 - DNA, 686 bp, synthetic construct
  misc_feature 1..686: note = Description of Artificial Sequence: Synthetic polynucleotide
  source 1..686: mol_type = other DNA
attatgttttagtttttttggttgtttttatttttaaatatttgaaaaatagaggtgttgggtgtgaggtggagagatgtataggtttggttttggttttgttttttgtttgttttaaagggtaaggtttttttgttttgtgttttgtttttgttttatttaggttttgttattatgtttgggggttttatttgggattggtttttgttttgtgtagtaaatttggaagtggattatgtggagtaaaggttttattgaggtgtgtgagttttgttttgttttgtattaagtttgtattttttaggtttttggtatttttgtttttgggatgtggggtttttatagatttggaaatttttgtttgtttttttttatttagagtaaattgagatgtttataagagtttggaagttgtttttttttgggtttgaagttgtttggaggttggttttgtttttggtttttttgttatagggtaatgtatatattttttattgtatagtttttttgtttaaaattttgttgatttattttgttttttgttttttaaagtttttatttgtgtgttggatttttgttttgggtgttttttagtttttgttggttttttttggagtgtagtgttggggttttagttttggggaggttgggttttttgtttggttttgggagtttgtaggtgttat

SEQ ID NO: 15357 - DNA, 201 bp, synthetic construct
  misc_feature 1..201: note = Description of Artificial Sequence: Synthetic polynucleotide
  source 1..201: mol_type = other DNA
aggttggtagattatgaggttaggagattgagattgttttggttaatatggtgaaattttgtttttattaaaaatataaaaattagttgggtgtggtggtgtgtttttgttttagttgttggggaggttgaggtaggagaatggtgtgaatttgggaggtggagtttgtagtgagttgagattgtattattgtattttagt

SEQ ID NO: 15358 - DNA, 201 bp, synthetic construct
  misc_feature 1..201: note = Description of Artificial Sequence: Synthetic polynucleotide
  source 1..201: mol_type = other DNA
tattgtaagttttgttttttgggtttatgttgttttgttgattttgtgatttgttttgttttggttttttaaagtgttgggattataggtgtgagttattgtgtttggttaatagtttttaatattaattatttagagtgtgtaataatttggaaaagggtttttttttttttttttgtttttagagatagggtttttggt

SEQ ID NO: 15359 - DNA, 201 bp, synthetic construct
  misc_feature 1..201: note = Description of Artificial Sequence: Synthetic polynucleotide
  source 1..201: mol_type = other DNA
tgggagtgatttgatttttaaggtgtgtttgttatttttttttttgatttagaaagggaattttttgattttttgtgttttttaagtgaggtagtgttttgttttgttttggtttgtatatggtgtatgtatttattgatttgtgtttattgtttggtattttttagtgagatgaatttggtattttagatggaaatgtag

SEQ ID NO: 15360 - DNA, 201 bp, synthetic construct
  misc_feature 1..201: note = Description of Artificial Sequence: Synthetic polynucleotide
  source 1..201: mol_type = other DNA
attttataaaaatgaaaattaaataagtataagaatggttatatttgggggaggagttaatatggttgaataggaatagttttggtttatagtttttagtgtgagtgatatagaagatggtgatttttgtatttttaattgaggtattgggtttattttattagggattgttagatagtgggtgtaggttagtgggtgtgt

SEQ ID NO: 15361 - DNA, 201 bp, synthetic construct
  misc_feature 1..201: note = Description of Artificial Sequence: Synthetic polynucleotide
  source 1..201: mol_type = other DNA
tggggttttattttgttagttaggatggttttgattttttgattttgtggtttgtttgttttggttttttaaagtgttgggattatagatttgaattattgtgttgggttagttttgtgggtttttaatgtgtttttttttatttgtaatttagagttagaagaggttagtgttgataggtaggtagtagttatatgaaaa

SEQ ID NO: 15362 - DNA, 201 bp, synthetic construct
  misc_feature 1..201: note = Description of Artificial Sequence: Synthetic polynucleotide
  source 1..201: mol_type = other DNA
ttattaaaaatataaaaaattagttgggtgtggtggtgggtgtttgtaattttagttatttgggaggttgaggtagaagaatggtatgaatttaagaggtggagtttgtagtgagttgggatagtgttattgtagtttagtttgggtgaaagagtgagattttgttttaaaaaaaaaaaaaaaaaaaaaaaaaaaagattt

SEQ ID NO: 15363 - DNA, 201 bp, synthetic construct
  misc_feature 1..201: note = Description of Artificial Sequence: Synthetic polynucleotide
  source 1..201: mol_type = other DNA
ggagggtggtgagggtggggagggggaaggtgggaggttgggtttggtgtatgggggttgggtatattttttttgggtatttttaggataggtgaggaatgtattggttgggattttatttatgagtaggagggtaaggtgtagtttgtgattgatgtggtgtatgttattgtttatgttttttatagtatgtattaggtg

SEQ ID NO: 15364 - DNA, 201 bp, synthetic construct
  misc_feature 1..201: note = Description of Artificial Sequence: Synthetic polynucleotide
  source 1..201: mol_type = other DNA
ttatataagttgtagtttgggtagatgttgtatttgtagtgggtttttattataggtttattgtagttattgtagattatattggggtgtattatgttgtggggtgttttttgagtatatggtgggtggtggttttgttggtatttttttttttttataggaagggtaaagagagttgttagggtgggattttttaaagtt

SEQ ID NO: 15365 - DNA, 201 bp, synthetic construct
  misc_feature 1..201: note = Description of Artificial Sequence: Synthetic polynucleotide
  source 1..201: mol_type = other DNA
tatggggaaattttgtttttattaaaaatataaaaattagtttggtgtggtggtatataattgtaattttagttatttgggaggttgaggtaggagaattgttggaatttgggaggtggagtttgtagtgagttaagattgtgttatgtattttaatttgggtgttgtagtgagattttgtttttaaataaataaagtgtt

SEQ ID NO: 15366 - DNA, 201 bp, synthetic construct
  misc_feature 1..201: note = Description of Artificial Sequence: Synthetic polynucleotide
  source 1..201: mol_type = other DNA
agtaattaataaagtgaagatatggtttattgaagtgtagaaaatatttataagttgggtgtggtagtttatgtttgtaattttagtattttgggaggttgagatatgtggattataaggttaggagattgagattattttggttaatatagtgaaattttgtttttattataaatagaaaaaattagttgggtatggtgg

SEQ ID NO: 15367 - DNA, 227 bp, synthetic construct
  misc_feature 1..227: note = Description of Artificial Sequence: Synthetic polynucleotide
  source 1..227: mol_type = other DNA
agattggttttttttatttaataatatgtattttaatttttagggttgggtgtggtggtttatgtttgtaattttagtattttgggaggttgaggttggtggattatgaggttaggagattaagatgattttggttaatatggtgaaattttgtttttattaaaaatatagaaaataagttgggtgtggtggtgggtatttgtagttttagttatttaggaggttga

SEQ ID NO: 15368 - DNA, 201 bp, synthetic construct
  misc_feature 1..201: note = Description of Artificial Sequence: Synthetic polynucleotide
  source 1..201: mol_type = other DNA
gttttttttttgagttaaagaaaggggtgatggatgtatttggaaaattgggttatttttatttgaatattgtgtttttttgattggtttaaaaaatggtgtattatgagattatattttatatttggtttggagttttgttgattgttagtatagtagtttgagattaaattgtaaggtggtagtaaggttgggggaggg

SEQ ID NO: 15369 - DNA, 201 bp, synthetic construct
  misc_feature 1..201: note = Description of Artificial Sequence: Synthetic polynucleotide
  source 1..201: mol_type = other DNA
atgtagaagatgggtgatttttgtatttttatttgaggtattgggtttattttatttgggagagttagatagtgggtgtaggttagtgggggtatgtattgtgtgtgagttgaagtagggagaggtattgttttatttgggaagtgtaaggggttagggagttttttttttgagttaaagaaaggggtgatagatgtattt

SEQ ID NO: 15370 - DNA, 201 bp, synthetic construct
  misc_feature 1..201: note = Description of Artificial Sequence: Synthetic polynucleotide
  source 1..201: mol_type = other DNA
ggtatttgttattatgtttggttaattttttgtatttatagtatagatggggttttattgtgttagttaggatggttttgattttttgattttgtgatttgtttgtttttgttttttaaagtgttgggattataggtgtgagttattgtgtttggtggaaaggatatttttttatagtatgagtattgaaataaaaaggta

SEQ ID NO: 15371 - DNA, 201 bp, synthetic construct
  misc_feature 1..201: note = Description of Artificial Sequence: Synthetic polynucleotide
  source 1..201: mol_type = other DNA
aattgtgttattggaagttaggaagtaaattttaattttagtattgtttttttttgaaatggagttttgttttgttatttaggttggagtgtagtggtgtgattttggtttattgtaagttttgttttttgggtttattttatttttttgttttagttttttgagtagttgggattataggtgtttgttattatgtttggt

SEQ ID NO: 15372 - DNA, 201 bp, synthetic construct
  misc_feature 1..201: note = Description of Artificial Sequence: Synthetic polynucleotide
  source 1..201: mol_type = other DNA
tttgggtgattgtttgtaatggagggagtgtgtgggttggtttgttagtggagagatttgttttatgttattaggagtttggttgagtattatggtgattgtggttgggtggaaggagatggatgtttatttgtgtaatttgtttttattttttttttaggggttattttagaataaaatgtaatggtttttttttgttta

SEQ ID NO: 15373 - DNA, 201 bp, synthetic construct
  misc_feature 1..201: note = Description of Artificial Sequence: Synthetic polynucleotide
  source 1..201: mol_type = other DNA
ataagttggttgtttggtaggttatattggggtttttaagagtttgggttgtagatgaatttaggtttgttttttttaattagtgtgatttgggtaagttgtgttttttttttgagttttagtttttttattttttaaatgggggtgatgttatttttattgttaggggtttttttgagtgggttataggaaggtgtttag

SEQ ID NO: 15374 - DNA, 201 bp, synthetic construct
  misc_feature 1..201: note = Description of Artificial Sequence: Synthetic polynucleotide
  source 1..201: mol_type = other DNA
tttagtttgggattggtagtatttttatttgtatgttatttttagggatggtaatattgtttattttgagtttagagtagttattatttttggtttttttgttggttttttgggaggttttaggaagatgtgattttttgttaggtatttgtgggtttttttatagttgttggggtggtttttgtttttttaaaattatat

SEQ ID NO: 15375 - DNA, 201 bp, synthetic construct
  misc_feature 1..201: note = Description of Artificial Sequence: Synthetic polynucleotide
  source 1..201: mol_type = other DNA
aaagttattgtaggtaattagaaaagttgtttttattttatggttgtgtttatttgtggtagataggataatggtttaaagatgtttgagatttgtgattgttttattttgtgattgtattattttatatggtaaagaagtttttgtatgtgtgattatgattaaggattttgagatttggagatgatttgggtatttggg

SEQ ID NO: 15376 - DNA, 201 bp, synthetic construct
  misc_feature 1..201: note = Description of Artificial Sequence: Synthetic polynucleotide
  source 1..201: mol_type = other DNA
gtggtggtaggtttgttgtgtttgttttagttagggtttagagttttttggttagtttattgtatttggattttagatgggtgtgttgggtggtgtttgtgttagggaaagagttggtggttggttgagttgttgtgtttttgagtgttgtgtttgttgtgattattggtgtggttgttttttggtaggtttgaaggaatc

SEQ ID NO: 15377 - DNA, 201 bp, synthetic construct
  misc_feature 1..201: note = Description of Artificial Sequence: Synthetic polynucleotide
  source 1..201: mol_type = other DNA
tttttgatattttgtttttatattgtattatttgttggtaattgtttttggatagtggttaggttgtggggaggttggttttggagtttatttttggggtgtatatttttgttaatttttttgaggtggggtataggattgtggtgttgtattatggggatttgttttttttggggttttattatttgttgttatttaagg

SEQ ID NO: 15378 - DNA, 201 bp, synthetic construct
  misc_feature 1..201: note = Description of Artificial Sequence: Synthetic polynucleotide
  source 1..201: mol_type = other DNA
gggtttagaggtattttagtaaatggtttaggaattgtagtattaatttatattgagaaatagaattgttatttaagaaagataattgttggtttaatgtggtggtttatgtttgtaattttagtattttgggaggttgaggttggtggattatgaggttaggagattgagattattttggttaatagggtgaaattttgt

SEQ ID NO: 15379 - DNA, 201 bp, synthetic construct
  misc_feature 1..201: note = Description of Artificial Sequence: Synthetic polynucleotide
  source 1..201: mol_type = other DNA
tatggtgaaattttgtttttattaaaaatataaaaaattagttaggtgtggaggtattttttgtaattttagatatttaggaggttgaggtaggaaaattgtttgaatttgggaggtggagtttgtagtgagttgatattgtattattgtgttttagtttgggtaatagagtaaaattttgttttaaaaaaaaaaaaaaaa

SEQ ID NO: 15380 - DNA, 201 bp, synthetic construct
  misc_feature 1..201: note = Description of Artificial Sequence: Synthetic polynucleotide
  source 1..201: mol_type = other DNA
tatttttttgttttagttttaggagtagttgggattataggtgtttgttataatgtttggttaattttttttgtatttttagtggagatggggttttattgtgttagttaggatggttttgattttttgattttgtgatttatttgttttagttttttaaagtgttgggattataggtgtgagttattgtgtttagttgtt

SEQ ID NO: 15381 - DNA, 201 bp, synthetic construct
  misc_feature 1..201: note = Description of Artificial Sequence: Synthetic polynucleotide
  source 1..201: mol_type = other DNA
gtttatagtttttagtgtgagtgatgtagaagatgggtgatttttgtatttttatttgaggtattgggtttattttattagggagggttagatagtgggtgtaggttagtgggtgtgtgtattgtgtgttagttaaagtagggtaaggtattgttttatttgggaagtgtaaggggttagggagttttttttttgagttaa

SEQ ID NO: 15382 - DNA, 201 bp, synthetic construct
  misc_feature 1..201: note = Description of Artificial Sequence: Synthetic polynucleotide
  source 1..201: mol_type = other DNA
tggtaaaattttatttttattaaaaatataaagatttagtatgggtatggtggtgtatatttgtaattttagttgtttgggaggttgaagtagaagaattgtgtgaatttgggaggtagaagttgtagtgagttaagattatgttattgtattttagtttgggtgatataatgagattttgtttaaaaaataaaataaaaa

SEQ ID NO: 15383 - DNA, 201 bp, synthetic construct
  misc_feature 1..201: note = Description of Artificial Sequence: Synthetic polynucleotide
  source 1..201: mol_type = other DNA
aaattttttatttttttgaggtagagttttattttgttgtttaggttggagtgtagtagtgtgattttggtttattgtaagttttattttttgggtttatgttatttttttgttttagttttttgagtagttgtgattataggtgttttttattatgttgggttaattttttgtatttttagtagagatggggttttattg

SEQ ID NO: 15384 - DNA, 201 bp, synthetic construct
  misc_feature 1..201: note = Description of Artificial Sequence: Synthetic polynucleotide
  source 1..201: mol_type = other DNA
ttttgagtagttgggattataggtgtttgttattatgtttggttaatattttgtatttttagtagagatggggttttattgtgttagttaggatggttttgattttttgattttgtgatttgtttgttttggttttttaaagtgttgggattataggtgtgagttattgtgtttggtttattttttttattttttatagag

SEQ ID NO: 15385 - DNA, 201 bp, synthetic construct
  misc_feature 1..201: note = Description of Artificial Sequence: Synthetic polynucleotide
  source 1..201: mol_type = other DNA
tgagttgagtggagattgtgttattgttttttagtttgggtgatagagggagattttgtgtttaaaaaaaatagatgtaggtaggagttttttttttggtgtttatatttagattgaagaaagtaattgggttgggtttggtggtttagatttgtaattttagtattttgggaggtttaggtagatgtattattttagttt

SEQ ID NO: 15386 - DNA, 201 bp, synthetic construct
  misc_feature 1..201: note = Description of Artificial Sequence: Synthetic polynucleotide
  source 1..201: mol_type = other DNA
ttggagtagtggtaggtggtaagggttgggtggggggttgttttattgggttttttattttttttttttttttttaattttttttttttttttttgagatggagttttgttttgttatttaggttggagtaaagaggtatgattttggtttatagtaatttttgttttttgggtttaagtgatttttttgttttatgtttt

SEQ ID NO: 15387 - DNA, 201 bp, synthetic construct
  misc_feature 1..201: note = Description of Artificial Sequence: Synthetic polynucleotide
  source 1..201: mol_type = other DNA
tgaagggagggatgagagttttattatttaattttaagtttagtggttggtgtttttggaagtggagatatatgtttattggtgtgtgatttatatttatgaaagggaatgtgttttttggaatataggggagttttggttagggaagttgtttttttatttaagagggataaaggtgtgtaaattttagaaattagatat

SEQ ID NO: 15388 - DNA, 201 bp, synthetic construct
  misc_feature 1..201: note = Description of Artificial Sequence: Synthetic polynucleotide
  source 1..201: mol_type = other DNA
aaattatttttgatttgagatataaaaataaagaggttgggtgtaaggtggtttatgtttgtaattttagtattttgggaggttgaggtgggtggattatgaggttagtagattgagattattttggttaatatggtgaaattttgtttttattaaataaaatataaaaaattagttgggtgtggtggtgggtgtttgtag

SEQ ID NO: 15389 - DNA, 217 bp, synthetic construct
  misc_feature 1..217: note = Description of Artificial Sequence: Synthetic polynucleotide
  source 1..217: mol_type = other DNA
ttttgaatgaaattaggaaggagaaagtatgggataatgggtttttgataatgataaaaagagaaaaaataaatagaaaaaagaggagggttggttgggtgtggttaggaaggtgtggttttggttaggagattgagattattttggttaatgtggtgaagttttgtttttattaaaaatataaaaaattagttgggtgtggtggggggtgtttgta

SEQ ID NO: 15390 - DNA, 217 bp, synthetic construct
  misc_feature 1..217: note = Description of Artificial Sequence: Synthetic polynucleotide
  source 1..217: mol_type = other DNA
ttgttatttttttttttgattgggaaagggaattttttgattttttgttttttttaagtgaggtagtgttttgttttgttttggtttgtgtatggtgtatgtatttattgatttgtgtttattgtttggtattttttagtgagatgaatttggtattttagatggaaatgtagaaattatttgttttttgtgttgtttaagttgggagttgtagatc

SEQ ID NO: 15391 - DNA, 201 bp, synthetic construct
  misc_feature 1..201: note = Description of Artificial Sequence: Synthetic polynucleotide
  source 1..201: mol_type = other DNA
tgttggtgggagttaaaatggattaattatataaaaaataatttttaggttgggtgtagtggtttatgtttgtaattttggtattttgggaggttaaggtgggtggattatgaggttaggaaattgatattattttggttaataaggtgaaattttatttttattaaaaatataaaaatttagttgggtgtggtggtgggt

SEQ ID NO: 15392 - DNA, 201 bp, synthetic construct
  misc_feature 1..201: note = Description of Artificial Sequence: Synthetic polynucleotide
  source 1..201: mol_type = other DNA
tggagattttttatttattgtggtagtaaatttgtttgaggtgtttgtatgttttagttttggggttttgggggttgtgtttatagtttttttattttttggtttttatgttagggtttttggtttatattgtgttgttttgttttatatgagattggaaagttatatgtggataatttaggatttatttagggttatata

SEQ ID NO: 15393 - DNA, 201 bp, synthetic construct
  misc_feature 1..201: note = Description of Artificial Sequence: Synthetic polynucleotide
  source 1..201: mol_type = other DNA
gtagggtttgaattttttttttaggagggttagggttgtggttgggtgatgttaggtggggaagatattagaagaggagaaaattaggagtgtaggatgtggtgggagattgggaggttgtagagaggaggtttgaggataggagggaaggaggtggggatagaggttgagggttggaggggttgttgggttttttttggg

SEQ ID NO: 15394 - DNA, 201 bp, synthetic construct
  misc_feature 1..201: note = Description of Artificial Sequence: Synthetic polynucleotide
  source 1..201: mol_type = other DNA
gttattgtgtttggttaatttttttgtatttttttagtagagttggggttttattgtgttagttaggatggttatgattttttgattttgtgatttggttgttttggttttttaaagtgttgggattataggtgttaagttattgtgtttggttgatagttagatttttaaaggtgtttgaatttttttaatgtggaaata

SEQ ID NO: 15395 - DNA, 201 bp, synthetic construct
  misc_feature 1..201: note = Description of Artificial Sequence: Synthetic polynucleotide
  source 1..201: mol_type = other DNA
agtttatgtatggtgtgtgtatttattgatttgtatttattgtttggtattttttagtgagatgaatttggtattttagatggaaatatagaaattatttgttttttgtgttgtttatagtgggagttgtagattggagttgtttttatttggttattttggtttgatttggagtggtatatgtttttaaataattaaatt

SEQ ID NO: 15396 - DNA, 201 bp, synthetic construct
  misc_feature 1..201: note = Description of Artificial Sequence: Synthetic polynucleotide
  source 1..201: mol_type = other DNA
ttggtgagaagttgagtatagtagttgttggtttaggtgttaagttttttattgtttggggttgttggttgttttaagtgtgggttagtttagtttatgtgtatttggaagttgtgttggtgagggagggttgtgagggttgttagtatgttattattttttattgggattataggtgtgagttatggtgtttggttgaag

SEQ ID NO: 15397 - DNA, 201 bp, synthetic construct
  misc_feature 1..201: note = Description of Artificial Sequence: Synthetic polynucleotide
  source 1..201: mol_type = other DNA
ttatgttatttttttgttttagtttgtagttgggattataggtgtttgttattatgtttggttattttttttgtatttttaatagagatggggttttattgtgttagttaggatggttttaatttgttgattttgtgatttgtttgttttggttttttaaagttttgggattgtaggagtgagttattgtgtttggttgta

SEQ ID NO: 15398 - DNA, 201 bp, synthetic construct
  misc_feature 1..201: note = Description of Artificial Sequence: Synthetic polynucleotide
  source 1..201: mol_type = other DNA
tagattggagtgtagtggtatgattttggtttagaatttttgttttatgggtttaagtaatttttttgttttagtttttggagtagttgggattataggtgtttgttattatgttaggttaattttttgtatttttagtagggatggttgattgggtgtggtggtttatgtttgtaattttagtattttgggaggttgagg

SEQ ID NO: 15399 - DNA, 201 bp, synthetic construct
  misc_feature 1..201: note = Description of Artificial Sequence: Synthetic polynucleotide
  source 1..201: mol_type = other DNA
tattttttagatgggatagtggttgggaagaggtgttttttattttttagatgggatggtggttaggtagagatgttttttattttttagatggggtggtggttgggtagaggttgtaattttggtattttgggaggttaaggtaggttgttgggaggtgaaggttgtagtgagttgagattatgttattgtattttagtt

SEQ ID NO: 15400 - DNA, 201 bp, synthetic construct
  misc_feature 1..201: note = Description of Artificial Sequence: Synthetic polynucleotide
  source 1..201: mol_type = other DNA
gatggagttgtttgttagttttggtattgtgtgtttgtattttttagtttttgggtggttaatgggattgggtgttgtggagtagggggtggtgtttgttggggaggtttgggttgtataggagtttatggaaggggtgggaggtttaggtatggtgggttgtaggttttgagttttgttttgtgggaaggtagttaaggt

SEQ ID NO: 15401 - DNA, 286 bp, synthetic construct
  misc_feature 1..286: note = Description of Artificial Sequence: Synthetic polynucleotide
  source 1..286: mol_type = other DNA
gagttaggtgtgggatatagttttgtggtgtattgttttttaagttggtttgaaaagtgtaataattgggtgggagtgatttgattttttaggtgtgtttgttatttatttatttgatttggaaagggaattttttgattttttgtgttttttaggtgaggtaatgttttgttttgttttggtttgtgtatggtgtgtgtatttattggtttgtgtttattgtttggtattttttagtgagatgaatttggtattttagatggaaatgtagaaattatttgttttt

SEQ ID NO: 15402 - DNA, 201 bp, synthetic construct
  misc_feature 1..201: note = Description of Artificial Sequence: Synthetic polynucleotide
  source 1..201: mol_type = other DNA
aggtaaagttgtttgttagttttatgttttgtgtttatgttttttagttgttttatagttgatgggattgggtgttatggagtagggggtggtgtttgttggggaggtttttgttgtataggagtttagggtagtggggggaggtttatatatggtaggttgtaggttttaagttttgttttgtagggaggtagttgaggt

SEQ ID NO: 15403 - DNA, 201 bp, synthetic construct
  misc_feature 1..201: note = Description of Artificial Sequence: Synthetic polynucleotide
  source 1..201: mol_type = other DNA
aggtgggtggattatgaggttaggggtttgagatgagtttggttaatatggtgaaattttgtttttattaaaaatataaaaattagttgggtgtggaggtgtgtgtttgtaattttagatatttgggaggttgaggtaagagaattgtttgaatttgggaggtggaggttgtagtgagttgagatggtgttattgtatttt

SEQ ID NO: 15404 - DNA, 201 bp, synthetic construct
  misc_feature 1..201: note = Description of Artificial Sequence: Synthetic polynucleotide
  source 1..201: mol_type = other DNA
gagtgatgtagaagatgggtgatttttgtatttttatttgaggtattgggtttattttattagggagtgttagatagtgggtgtaggttagtgggtgtgtgtaatgtgtgtgagttgaagtagggtgaggtattgttttatttgggaagtgtaaggggttagggagttttttttttgagttaaaggaaggggtgatggagg

SEQ ID NO: 15405 - DNA, 201 bp, synthetic construct
  misc_feature 1..201: note = Description of Artificial Sequence: Synthetic polynucleotide
  source 1..201: mol_type = other DNA
gtgttgtttgttatttttttttttgattaggaaagggaattttttgattttttgtgtttttggagtgaggtaatgttttgttttgttttagtttgtatatggtgtatgtatttatggatttgtgtttattgtttggtattttttagtgagatgaatttggtattttagatggaaatgtagaaattatttgttttttgtgtt

SEQ ID NO: 15406 - DNA, 201 bp, synthetic construct
  misc_feature 1..201: note = Description of Artificial Sequence: Synthetic polynucleotide
  source 1..201: mol_type = other DNA
atttttatttgaattttgatagtagttattatgtagagttgttaaaatgtatatttttggttgggtgtggtggtttatgtttgtaattttagtattttgtggggttgaggtgggtggattatgaggttaagagattaagattattttggttaatatggtgaaattttgtttttattaaaaatataaaaaaaattagttggg

SEQ ID NO: 15407 - DNA, 201 bp, synthetic construct
  misc_feature 1..201: note = Description of Artificial Sequence: Synthetic polynucleotide
  source 1..201: mol_type = other DNA
ttaggtgttatttgttatttttttttttgatttagaaagggaattttttgattttttgtgttttttaggtgaggtaatgttttgttttgttttggtttgtgtatggtgtgtatatatattggtttgtgtttattgtttggtattttttagtgagatgaatttggtattttagatggaaatgtagaaattatttgttttttg

SEQ ID NO: 15408 - DNA, 201 bp, synthetic construct
  misc_feature 1..201: note = Description of Artificial Sequence: Synthetic polynucleotide
  source 1..201: mol_type = other DNA
tttagtttattgttgtattgtgagagtttttttttgggttggttaaggttagagtttgtttttttagtttgtagggaggtgtggatggagaggtgtgagtgggaatttaggttgtgtatggtgtttgtgggttagttggagttttgggtgggtgtgggtttggtaggttttgtattgggagtagttggttggttttgttag

SEQ ID NO: 15409 - DNA, 201 bp, synthetic construct
  misc_feature 1..201: note = Description of Artificial Sequence: Synthetic polynucleotide
  source 1..201: mol_type = other DNA
ggggagagggattgattttttgtgttttatttttagtttatttaattttagtgtagtttggagattgttattgtgttttttggagggtgatggagtttttgttttgtttaggagtagtttggtttttgggagggtagtttgatttttatggtattgttggtgattttttagtttaggttttggggttgtgagaattttaag

SEQ ID NO: 15410 - DNA, 201 bp, synthetic construct
  misc_feature 1..201: note = Description of Artificial Sequence: Synthetic polynucleotide
  source 1..201: mol_type = other DNA
atgagtgttattgatggtagagttgttttttttatgttttgtggggattgggaagagattgtagggagtgaggtattttatttgtttatttggtagatttgaagattgagatttgagagtttgtagttttgggttatatttttagtgtttggtttagttttttttttatttttttatttgttttttgtagatgaggggttt

SEQ ID NO: 15411 - DNA, 201 bp, synthetic construct
  misc_feature 1..201: note = Description of Artificial Sequence: Synthetic polynucleotide
  source 1..201: mol_type = other DNA
gttgtaattttattgagtgtgtttgtttattagatatttgattttgtaagattgttttttttttttttttttgatggagttttgttttgttgtttaggttgaagtgtagtggtgtgattttggtttattgtaagttttgttttttgggtttatgttatttttttgttttagttttttgagtagttgggattataggtgttc

SEQ ID NO: 15412 - DNA, 210 bp, synthetic construct
  misc_feature 1..210: note = Description of Artificial Sequence: Synthetic polynucleotide
  source 1..210: mol_type = other DNA
ttttgggtttttattttttttttttttttttttttttttttgagatgaagttttattttgttgtttgggttggagtgttgtggtaggattttggtttattgtaagttttgttttttggatttatgttatttttttgttttagttttttgagtagttgggattagaggtgtttgttattgtgttaggttaatttttttgtatttttagtag

SEQ ID NO: 15413 - DNA, 201 bp, synthetic construct
  misc_feature 1..201: note = Description of Artificial Sequence: Synthetic polynucleotide
  source 1..201: mol_type = other DNA
taagttgggtgtggtggtttatgtttgtaattttagtattttgggaggtttaggtaggtggattatgaggttaggagattaagattattttggttaatatggtgagaattttgtttttataaaaaatataaaaaattagttgggtgtttgtagttttagttatttgggaggttgaggtgagagaatggtgtgaatttgggg

SEQ ID NO: 15414 - DNA, 201 bp, synthetic construct
  misc_feature 1..201: note = Description of Artificial Sequence: Synthetic polynucleotide
  source 1..201: mol_type = other DNA
gggttaaagaggaattggaaagggtttggggtagatgtgggtgttatagggtgagttgggttaggttgagaggatttatgggttatgggagtttgtgggtgatggtttggtaggggtttgtggtgggaatagggataaaatatatttaataaattgtttatttagagtaagttgtgtgggtataatggtgagaaaatggtt

SEQ ID NO: 15415 - DNA, 201 bp, synthetic construct
  misc_feature 1..201: note = Description of Artificial Sequence: Synthetic polynucleotide
  source 1..201: mol_type = other DNA
ggtgggtgggttatgaagttaggagattgagattattttggttaatatggtgaaattttatttttattaaaaatataaaaaattagtttggtatagtggtgggtgtttgtagttttagttagtttggaggttgaggtaggagaatggtgtgaatttgggaggtggagtttgtagtgagttgagattgtgttattgtattat

SEQ ID NO: 15416 - DNA, 201 bp, synthetic construct
  misc_feature 1..201: note = Description of Artificial Sequence: Synthetic polynucleotide
  source 1..201: mol_type = other DNA
gtttatgttattttaatagtgggtttttttttggtgagaattggttaatagttattgttttgtttttttagtatgttgtttgattagagagggatagggtggggaggaaaattggggtgttgtgggttgtagttttagttgtaaatatgggagttttttttgatgtttgtggtttgttggtttgaaagggagaaatatgga

SEQ ID NO: 15417 - DNA, 201 bp, synthetic construct
  misc_feature 1..201: note = Description of Artificial Sequence: Synthetic polynucleotide
  source 1..201: mol_type = other DNA
ttatgaatttttgagtttaagtgatttttttatttggttttgtgaagtgttgggattatatgtgtgagttattatgttgggattataggtgtgagttattgtgttgggattatgggtatgagttattgtgttggtttttagtaaatattttattagtatttagtgaattttgggtttttgtggaataggaatgtttgtttt

SEQ ID NO: 15418 - DNA, 201 bp, synthetic construct
  misc_feature 1..201: note = Description of Artificial Sequence: Synthetic polynucleotide
  source 1..201: mol_type = other DNA
aggttgaggttggtggattataaggttaggagattgagattattttggttaatatggtgaaattttgtttttattaaaaatataaaaaaattagttgggtgtggtggtgtgtatttgtagttttagttatttgggagtttgaggtaggagaatggtatgaatttgggaggtagagtttgtagtgagttaaaattgtattat

SEQ ID NO: 15419 - DNA, 201 bp, synthetic construct
  misc_feature 1..201: note = Description of Artificial Sequence: Synthetic polynucleotide
  source 1..201: mol_type = other DNA
aaggagatgtttgggttaggattgaagttttttggaataatgggttgggattttgaggttggtaggggtgtagtgggtattgggtttatgtgtggtttgtgttggttgatgtgggtatataaggggtatagttgttattgggggtttggaggggaggatttagttggggtttggagggttaggattttgtagaaggtttac

SEQ ID NO: 15420 - DNA, 201 bp, synthetic construct
  misc_feature 1..201: note = Description of Artificial Sequence: Synthetic polynucleotide
  source 1..201: mol_type = other DNA
tatggtgaaattttgttttaattaaaagtattaaaattatttgggtatggtggtatatgtttgtaattttagttatttgggaggttgaggtaggagaattgtttgagtttgggaggtggaggttgtagtgagttgtgattgtgttattgtattttagtttgggtgatagagtaagattttattttaataaaaaaattaaaa

SEQ ID NO: 15421 - DNA, 201 bp, synthetic construct
  misc_feature 1..201: note = Description of Artificial Sequence: Synthetic polynucleotide
  source 1..201: mol_type = other DNA
gtgatttttttgttttagttttttgagtagttaggattataggtgtttgtttttatgtttggttaattttttgtatttttggtagagatggggttttattgtgttagtaaggatagttttgattttttgattttgtgatttgtttgttttggtgttttaaagtgttgggattataggtatgagttattgtgtttggtgggg

SEQ ID NO: 15422 - DNA, 201 bp, synthetic construct
  misc_feature 1..201: note = Description of Artificial Sequence: Synthetic polynucleotide
  source 1..201: mol_type = other DNA
agtgaaatttttttttattaaaaatttaaaaaaattagttgggtgtggtagtatgtgtttgtagttttagttatttgagaggttgagataggagaatggtgtgaatttgggaggtggagtttgtagtgagttgagattgtgttattgtattttagtgtgggtgatagagtaagattttgttttaaaaaaaaagaaaataat

SEQ ID NO: 15423 - DNA, 201 bp, synthetic construct
  misc_feature 1..201: note = Description of Artificial Sequence: Synthetic polynucleotide
  source 1..201: mol_type = other DNA
agattatagatgaatttgaattttaagtagtatagatgtgttatatttattattttgttgttgattatttttgggattatattatatttattattttgttgttgattatttttgggattattatggtgggttatgatagtatgttttttttagaaatatgtttgaatagtataagaaaaggatattatttggatttgtgga

SEQ ID NO: 15424 - DNA, 201 bp, synthetic construct
  misc_feature 1..201: note = Description of Artificial Sequence: Synthetic polynucleotide
  source 1..201: mol_type = other DNA
tgttgttatttataagagtttttttttttttgtaattaatggttttgtttttggtttgtttagtaaattgaaattattgaaaaaggattttgttgggagtggtggtttatgtttgtaatattagtattttgggaggttgaggtgggttgattataaggttaggaaattgagattattttggttaatatggtgaaatttagt

SEQ ID NO: 15425 - DNA, 201 bp, synthetic construct
  misc_feature 1..201: note = Description of Artificial Sequence: Synthetic polynucleotide
  source 1..201: mol_type = other DNA
ttagagttaggtgtttattgttaatttggagtgtgtgttttagttttttggggttgattttggttgttgggttagtagtgtgaattttttttttttatatggggtttttaagatatgtgtttgtgtgtgtttgtttttaagatatgtgtgtgtgtatatgtgtgtgtgtgtgtgtgttttatatgaatgatttgagttatt

SEQ ID NO: 15426 - DNA, 201 bp, synthetic construct
  misc_feature 1..201: note = Description of Artificial Sequence: Synthetic polynucleotide
  source 1..201: mol_type = other DNA
gttagtgtttttatggtagtttttgtattgggtttggggtgggggtggggggtggttgtggagtttttggtttttatttagtgtgttttttttatggggtgtattttaaagtgataagatgttttttaggaaatggggaatggatgttaggtttttagggagaggttgaggtagtttgaggtaaaaagggatgggttgagg

SEQ ID NO: 15427 - DNA, 201 bp, synthetic construct
  misc_feature 1..201: note = Description of Artificial Sequence: Synthetic polynucleotide
  source 1..201: mol_type = other DNA
gggtgtttatggagtttttagtttttatttagggtgtgtgttttttttatggggggtattttaaaggggtatgaagttttttgggggatggggatatgatgttaggtttttagtgggatattgagatagttgggggaaaaaagttgggagggtaagaaggttggggtatttttatggaggttagtttttttttagtagttt

SEQ ID NO: 15428 - DNA, 201 bp, synthetic construct
  misc_feature 1..201: note = Description of Artificial Sequence: Synthetic polynucleotide
  source 1..201: mol_type = other DNA
gtatttattgttttgtattaattgtttagtattttttagtgagatgaatttgttattttagttggaaatgtagaaattatttattttttgtgttgtttatgttgggagttgtagattggagttgtttttatttggttattttggttttattttattatattttttttatttagtttattattgatggatatttgggttggt

SEQ ID NO: 15429 - DNA, 201 bp, synthetic construct
  misc_feature 1..201: note = Description of Artificial Sequence: Synthetic polynucleotide
  source 1..201: mol_type = other DNA
gtaggtgttagggagaggtaattttttaaatagataaaaatatttttggttgggtgtggtggtttatgtttgtaattttagtattttgggaggttgatgtgggtggattatgaggttaggagattgagattatttttgttaatatggtgaaattttgtttttattaaaaatataaaaaattagttgggtgtggtggtgggc

SEQ ID NO: 15430 - DNA, 201 bp, synthetic construct
  misc_feature 1..201: note = Description of Artificial Sequence: Synthetic polynucleotide
  source 1..201: mol_type = other DNA
tggttttattatgttagttaggatggttttaattttttgattttgtgatttgtttgttatggtttttgaaagtgttgtgattataggtatgagttattgtgtttggtttaaaataatttttgaggttatataagaatatagtttatgtttatttatagttgtatttaatttaattaagaatttgttttttaagatgaaaaa

SEQ ID NO: 15431 - DNA, 201 bp, synthetic construct
  misc_feature 1..201: note = Description of Artificial Sequence: Synthetic polynucleotide
  source 1..201: mol_type = other DNA
tgggtttttgatttgtgtggatgagtagttttgagttttatatagggtgggtgatgttgtagattgataaggtttatttttggttatattgagttaaagtggaaggggtgtaggtgtggagtgttatgtgtgatgttattgttggttagttggagtggaggtgtttgttatgtgtatggggagatgtgtttttggttagtt

SEQ ID NO: 15432 - DNA, 366 bp, synthetic construct
  misc_feature 1..366: note = Description of Artificial Sequence: Synthetic polynucleotide
  source 1..366: mol_type = other DNA
ttgttttgtagtttgattttagattgttgtgttagtaattagtgagattttgtgggtgtaggattttttaagttaggtgtgggatatagttttgtggtgtgttattttttaagttggtttgaaaagtgtaatatttgggtgggagtgatttgattttttaggtgtgttggttatttttttttttgatttggaaagggaattttttgatttttggtgttttttaggtgaggtaatgttttgttttgttttggtttgtttatggtgtgtgtatttattggtttgtgtttattgtttggtattttttagtgaggtgaatttggtattttagatggaaatgtagaaattatttgttttttgtgttgttta

SEQ ID NO: 15433 - DNA, 201 bp, synthetic construct
  misc_feature 1..201: note = Description of Artificial Sequence: Synthetic polynucleotide
  source 1..201: mol_type = other DNA
ggtttttgtagggttgagtttttttaatgagtgttgttttttgttttatggtgtttggttttattgattgtttaagggttgaggattgtgggagtattgtgtgggattggtaggtagttttatttgtggtttttggtgtgggatttattgggtgaagttagttgggtttgtgagtttagtgtggatttggagaatttttat

SEQ ID NO: 15434 - DNA, 201 bp, synthetic construct
  misc_feature 1..201: note = Description of Artificial Sequence: Synthetic polynucleotide
  source 1..201: mol_type = other DNA
tgtagaagatgagtgatttttgtatttttatatgaggtattgggtttattttattagggagtgttagatagtgggtgtaggatagtgggtgtagtgtattgtatgtgagttgaagtagggtgaggtattgttttattttggaagtataaggggttagggagtttttttttttagttaaagaaaggggtgatagatggtatt

SEQ ID NO: 15435 - DNA, 201 bp, synthetic construct
  misc_feature 1..201: note = Description of Artificial Sequence: Synthetic polynucleotide
  source 1..201: mol_type = other DNA
tttttttttttagttaaagaaaggggtgatagatagtatttggaaaattgggttattttaattggaatattgtatttttttaataggtttaaaaaatggtgtatttggagattgtattttgtatttggtttggagggttttatgtttatggagttttgttgattgttagtatagtagtttgagattaaattgtaaggtggt

SEQ ID NO: 15436 - DNA, 384 bp, synthetic construct
  misc_feature 1..384: note = Description of Artificial Sequence: Synthetic polynucleotide
  source 1..384: mol_type = other DNA
tttgtttttttggtttttgttgtttatgagaaatgaggaaaaataaaggttagatttttaataatttttttggaagaaagagttgttttgagtgggtgttggtgtttatatatgttgtttttaaaaaaatttgttttgtttaggtttgtgtgaatataatgttggatgaattttgtttttttagaagaaagttgggttggtgtgtttgatgatgtagtgtttgtagtggtgtttgataaagtgtagggtttttatggagattttgtagttttggatatttagtgtttggaggttaaagtagttggtggttatgatttgtaagttttggttggtgatgtttttgtaggatttgaggttgagttgtttgaggttgaagtagtttag

SEQ ID NO: 15437 - DNA, 216 bp, synthetic construct
  misc_feature 1..216: note = Description of Artificial Sequence: Synthetic polynucleotide
  source 1..216: mol_type = other DNA
tgggagtgatttgattttttagttgtgtttattatttttttttttgatttggaaagggaattttttgattttttgtgttttttaggtgaggtaatgttttgttttgttttggtttgtgtatggtgtgtgtatttattggtttgtgtttattgtttggtattttttagtgagattaatttggtattttagatggaaatgtagaaattatttgttttt

SEQ ID NO: 15438 - DNA, 334 bp, synthetic construct
  misc_feature 1..334: note = Description of Artificial Sequence: Synthetic polynucleotide
  source 1..334: mol_type = other DNA
ttgtgttggtaattagtgagattttgttgggtaggattttttgagttagatgtgggatataattttgtggtgtgttgttttttaggttggtttgaaaagtgtaatatttgggtgggagtgatttgattttttaggtgtgtttgttatttttttttttgattaggaaagggaattttttgatttttggtgttttttgagtgaggtattgttttattttgttttggtttgtgtatggtgtgtgtatttattgatttgtgtttattgtttggtattttttagtgagatgaatttggtattttagatggaaatgtagaaattattgttttttatgtta

SEQ ID NO: 15439 - DNA, 201 bp, synthetic construct
  misc_feature 1..201: note = Description of Artificial Sequence: Synthetic polynucleotide
  source 1..201: mol_type = other DNA
tttgatgtaaggtggggtaggtaaaagtttggtagttatttgagaaggtgtgattaaaatggaggaatttgagagattttttgaggattgtaggtttggtgtggagtttgtgtttaatggtttggtttatggtagtgtggaggttattttggttttaatgtttggtgtttttgggttgtattagtaagattttaggatttt

SEQ ID NO: 15440 - DNA, 270 bp, synthetic construct
  misc_feature 1..270: note = Description of Artificial Sequence: Synthetic polynucleotide
  source 1..270: mol_type = other DNA
ttttggtttttgtttgtgtttttttttttatatttttttgtaagttgagggagttggttttggttttggttagtttaggaatgggtttttatagtgtagtggtgggttgaagggttttttaagtgtggttagagtgggtgttaaggttgaggaggtgttaagagtgagtgagggttgtgagggttgttatgttggtatattgttattttttagaaggatgtagggtagagttttaggttggttttgttatttatgttggagtgtagtggt

SEQ ID NO: 15441 - DNA, 253 bp, synthetic construct
  misc_feature 1..253: note = Description of Artificial Sequence: Synthetic polynucleotide
  source 1..253: mol_type = other DNA
ggttggaaaagtgtagtattttggtgggagtgatttgattttttaggtgtgtttgttatttttttttttgatttggaaatggaattttttgattttttgtgttttttaagtgaggtaatgttttgttttgttttggtttgtgtatggtgtgtgtatttattgatttgtgtttattgtttggtattttttagtgagatgaatttggtattttagatggaaatgtagaaattatttgttttttatgttgtttatg

SEQ ID NO: 15442 - DNA, 204 bp, synthetic construct
  misc_feature 1..204: note = Description of Artificial Sequence: Synthetic polynucleotide
  source 1..204: mol_type = other DNA
taaattagtaaatttaatattttaggatttttgttaagaagtttggttttggttgggaggatggagtttagtgggtagtggagttgttttagtttttgttgttgttttgtttgggagggaggtggggggggttagtttttttgtttggttagttgttttgtttgggaggtgaggggtgtttttgtttggttgtttttattggga

SEQ ID NO: 15443 - DNA, 228 bp, synthetic construct
  misc_feature 1..228: note = Description of Artificial Sequence: Synthetic polynucleotide
  source 1..228: mol_type = other DNA
atttgggaagtataaggggttagggagtttttttttttggttaaggaaaggggtgatagatagtatgtggaaaattaggttttttttatttgaatattgtgttttttttatgggtttaaaaattggtgtattaggagattatattttgtatttggtttggagggttttatgtttatggagttttgttgattgttagtatagtagtttgagattaaattgtaaggtagt

SEQ ID NO: 15444 - DNA, 217 bp, synthetic construct
  misc_feature 1..217: note = Description of Artificial Sequence: Synthetic polynucleotide
  source 1..217: mol_type = other DNA
tttagtggttgtaggggttgttgtgtgttttgtagatggatatgtgttatttaatatagagatgtgttgagtttgggtgattagtgaattgtatgttattgtagatattagaaagtgaaagtatatgggggaaggttttgggtatagatttagtatggttattatttgagttggagttgtttgtgagatgatgagtgtttgtaatttgtattttgtg

SEQ ID NO: 15445 - DNA, 201 bp, synthetic construct
  misc_feature 1..201: note = Description of Artificial Sequence: Synthetic polynucleotide
  source 1..201: mol_type = other DNA
tttggtgtttaatttttgaattttaaggaaaaatagggtagaatagaaagtgaaataggtttgaaggtatttattgtgtggtaatattttagatgagtttgatggtatttattgtgtggtaatattttagatgaatatttaagatgtgtttggagttggttttttttagtgggtttgtggttttagtgattttaagaatga

SEQ ID NO: 15446 - DNA, 204 bp, synthetic construct
  misc_feature 1..204: note = Description of Artificial Sequence: Synthetic polynucleotide
  source 1..204: mol_type = other DNA
atggtgtgtatatttattgatttgtgtttattgtttggtattttttagtgagatgaatttggtatttttgatggaaatgtagaaattatttattttttgtgttgtttatgttgggagttgtagattggagttgtttttatttggttattttggtttttttttggtattttttttattttttatttaggattagtttgttgtttt

SEQ ID NO: 15447 - DNA, 223 bp, synthetic construct
  misc_feature 1..223: note = Description of Artificial Sequence: Synthetic polynucleotide
  source 1..223: mol_type = other DNA
tagaagtataagtaattgtttttttttgtattttagtggaatgttgtgggttttttgaagatttttttttgttttgtaggttttggtattttaagtatgtgagtttgtgtaggaggtgttttgttttttggagttttttattgttttttagatatagttttggttttttattttgggtggaggtttttttagatgggttttgattgtttttgtatgtttattg

SEQ ID NO: 15448 - DNA, 201 bp, synthetic construct
  misc_feature 1..201: note = Description of Artificial Sequence: Synthetic polynucleotide
  source 1..201: mol_type = other DNA
tatttataaggttgaggtaggagaattgtttgaagttgggaggtggaggttgtaatgagttgagattatattattgtattttagtttgggtgataagagtgaaattttgtaataatattaataataataataaaataaaaataaaaataaaaaagaaaataagagatgtggtggttttgtttgtaattttagtattttggg

SEQ ID NO: 15449 - DNA, 203 bp, synthetic construct
  misc_feature 1..203: note = Description of Artificial Sequence: Synthetic polynucleotide
  source 1..203: mol_type = other DNA
tttaatattaagttaggtttagggaagtgttttttttttttttttttttttttatttgagatgtagttttattttgttatttaggttggagtatagtggtgtgattttggtttattgtaagttttgttttttgggtttatgttattttgttgttttagttttttgagtagttgggattattgtttgattaatttatttgtatt

SEQ ID NO: 15450 - DNA, 201 bp, synthetic construct
  misc_feature 1..201: note = Description of Artificial Sequence: Synthetic polynucleotide
  source 1..201: mol_type = other DNA
tataaaaagaattataaaatattgttgaaaaaaattagataatagttgggtgtggtgttttatgtttgtaattttagtagtttgggaggttgagttgggtggattatgaggttaggagatttagattattttggttaatatggtgaaattttggtgaaattttgtttttattaataatataaaaaaattagttgggtgtgg

SEQ ID NO: 15451 - DNA, 201 bp, synthetic construct
  misc_feature 1..201: note = Description of Artificial Sequence: Synthetic polynucleotide
  source 1..201: mol_type = other DNA
attattgttaaaaattaaattgggttgggtgtggtggtttatgtttgtaattttagtattttggggggttgaggttggtggattatgaggttaggagattgagattattttggttaatatggtgaaattttatttttattaaaaatataaaaaattagttgggtgaggtggtaggtatttgtagttttagttatttgggag

SEQ ID NO: 15452 - DNA, 201 bp, synthetic construct
  misc_feature 1..201: note = Description of Artificial Sequence: Synthetic polynucleotide
  source 1..201: mol_type = other DNA
tttgttttgattttgtttgtgggtgttgggatatttgggtgtagagggtttgtgtttagttagaagtgatttttgtttttttttgtgtaggtgttggtgtgtttgttgtgtgtgtgtggtttgtgtgttgttgttttggtttgtgtttttatatgtgtaggaaaggatatgttgtttgtttttatgttttttgtgattttt

SEQ ID NO: 15453 - DNA, 201 bp, synthetic construct
  misc_feature 1..201: note = Description of Artificial Sequence: Synthetic polynucleotide
  source 1..201: mol_type = other DNA
gaggttgaggtaggagaattatgtgaatttggaaggtggagtttgtagtgagttgagattgtgttattgtattttagtttgggtgatagagtgagattttgttttaaaaaaaaaaaaaaaaaaaaaaaaagtgatttgggttgggtgtggtggtttatgtttgtaattttagtattttgggaggttgaggagggtagatta

SEQ ID NO: 15454 - DNA, 201 bp, synthetic construct
  misc_feature 1..201: note = Description of Artificial Sequence: Synthetic polynucleotide
  source 1..201: mol_type = other DNA
tattagttaggtatggtagtatatgtttgtaattttagttatttgggaggttgaggtaggagaattgtttgaatttgggaggtggagattgtagtaagttgagtttgtgttattttattttagtttgggtaagagtgaaattttattgggaaaaaaaaatttatagtttaggttgggtgtggtggtttatgtttgtaattt

SEQ ID NO: 15455 - DNA, 201 bp, synthetic construct
  misc_feature 1..201: note = Description of Artificial Sequence: Synthetic polynucleotide
  source 1..201: mol_type = other DNA
ggttagttttttgtttggttagttgttttatttgggaggtgaggggtgtttttgtttggttgtttttattgggaagtgaggagtttttttgtttggttatgattttgtttgggaggtgtgtttagtagtttattggggatgggttatgatgataatggtggttttgtggaatagaaaggtgggaagggtggggaaaaaatt

SEQ ID NO: 15456 - DNA, 201 bp, synthetic construct
  misc_feature 1..201: note = Description of Artificial Sequence: Synthetic polynucleotide
  source 1..201: mol_type = other DNA
attggttaaagagtattgtgggtttttggaagtatttgtttttttattagttgtaaattggaatgataattagtttttaggttttggtttttgaatgtatgttgtgaatgatgtattgttttggttttatggtaggggttggggaggtttgttttattttgtattttgatttgggtttaaagttgagtttgaagggttttt

SEQ ID NO: 15457 - DNA, 201 bp, synthetic construct
  misc_feature 1..201: note = Description of Artificial Sequence: Synthetic polynucleotide
  source 1..201: mol_type = other DNA
tttgttattatgtttggttaattttttgtatttttagtagagatggggttttattgttttagttgggatggttttgattttttgattttgtgatttgtttgttttggttttttaaagtgttgggattataggtgtgagttattgtatttggttttttttttttttttttttttttaagatagagttttattttgttgttta

SEQ ID NO: 15458 - DNA, 201 bp, synthetic construct
  misc_feature 1..201: note = Description of Artificial Sequence: Synthetic polynucleotide
  source 1..201: mol_type = other DNA
attttggaaagtataggaggttatgttttagtgtggttttttttttttgggtttaagttaaggtttttattgtgtttgttggttttttgggtttttgtgtggtggattttggatttttttgttttgttttgttttagggtttttgtatttgttgttattgtggtttggaatgttttttttttgaaattttgtgatttttat

SEQ ID NO: 15459 - DNA, 201 bp, synthetic construct
  misc_feature 1..201: note = Description of Artificial Sequence: Synthetic polynucleotide
  source 1..201: mol_type = other DNA
tgtgtttataagaatattagttattggatttagggtttatttaatttagtatgattttattttaatttgattatatttgaaaagatttttggttgggtgtggtggtttatgtttataattttattattttgggaggttgaggtaggtggattatttgaggttaggagtttgagattagtttggttaatatggggaaatttt

SEQ ID NO: 15460 - DNA, 211 bp, synthetic construct
  misc_feature 1..211: note = Description of Artificial Sequence: Synthetic polynucleotide
  source 1..211: mol_type = other DNA
tttagtttttaggatgtgttttttatggttttttttgtggtgtggttatgtttggatttttttggtattttttatttgttttgtatgatttgttttgtgtgatttgttttgtaaggttggggggagtgttttttttttttgtgattttttatttttttttggtatttgtttattttgttgtttaggttttttgtttttttggttttagggc

SEQ ID NO: 15461 - DNA, 201 bp, synthetic construct
  misc_feature 1..201: note = Description of Artificial Sequence: Synthetic polynucleotide
  source 1..201: mol_type = other DNA
gtgtgtgtatttattgatttgtgtttattgtttggtattttttagtgagatgaattgggtattttagatgtaaatgtagaaattatttgttttttttgttgtttatgttgggagttgtagattggagttgtttttatttggttattttggtttttttttttgaaaagagtattttttaattaagaagatggttttggttgt

SEQ ID NO: 15462 - DNA, 201 bp, synthetic construct
  misc_feature 1..201: note = Description of Artificial Sequence: Synthetic polynucleotide
  source 1..201: mol_type = other DNA
atttagtggattttatattggggttgtaggtggagttgtttgttagttttgtgttgtgtgtttatattttttagtttttgggtggttgatgggattgggtgttgtggagtagggggtggtatttgtttgggaggtttgggtggtataggagtttatggagtgggtgggaggtttaggtatggtgggttgtaggttttgagt

SEQ ID NO: 15463 - DNA, 201 bp, synthetic construct
  misc_feature 1..201: note = Description of Artificial Sequence: Synthetic polynucleotide
  source 1..201: mol_type = other DNA
gatatgtataggttatttaagagaatgattgatttttggttatttggtgtttgtttgttgtggtggtgttgtgttgggtttaggggttttagggatttttgttgtgttgttagttttggaattttagtggggatttgttgtgtggaaatttttggataatagttttttttatggagaatttatgtttttataatgttatta

SEQ ID NO: 15464 - DNA, 201 bp, synthetic construct
  misc_feature 1..201: note = Description of Artificial Sequence: Synthetic polynucleotide
  source 1..201: mol_type = other DNA
ttatttttttatatttgtagagtgttttattttttgtaatgtttatttgtgaaattgttgtgttaggttaggagtattttaagagtgagaggtagatgttgtttgattttttattttgataggggatttttttatttggtagtgttaatatttggtttttatgtattttttatggaggattattaggttagtttatgggag

SEQ ID NO: 15465 - DNA, 201 bp, synthetic construct
  misc_feature 1..201: note = Description of Artificial Sequence: Synthetic polynucleotide
  source 1..201: mol_type = other DNA
ttttggtagagttagtatttgattttttttgtttggagatttaggtgatggtgttgtgtgatttttgattttgtggatgaggaaggtagagagagagtgtgtagatatggaggttggtgttgaggttgagggagttatatttggttgtaagtttgagggagggaagttgggtgtggaaatagtttagtgggtttagaagtc

SEQ ID NO: 15466 - DNA, 201 bp, synthetic construct
  misc_feature 1..201: note = Description of Artificial Sequence: Synthetic polynucleotide
  source 1..201: mol_type = other DNA
ttgttgttatgtttagttaattttttgtattgtttagtagagatggggttttattgtgttagttaggatggttttgattttttgattttgtgatttgtttgttttggttttttaaagtgttgggattataggtatgaattattgtatttggttaatttagtggttttgaggaggatttgttaggagttttgtaaaatgttt

SEQ ID NO: 15467 - DNA, 201 bp, synthetic construct
  misc_feature 1..201: note = Description of Artificial Sequence: Synthetic polynucleotide
  source 1..201: mol_type = other DNA
attggatggatgtttgttgttgttttattggggttgtgtggggagttgagtgtgaggtttgtttggattttgagtttttggagtttgttagtttgtgtttgtgggggttgggttttgttagttgggattttttgtttggttgattattttataaaggtgtggttggggaaggggttaggtttttggaaggatggggagggg

SEQ ID NO: 15468 - DNA, 201 bp, synthetic construct
  misc_feature 1..201: note = Description of Artificial Sequence: Synthetic polynucleotide
  source 1..201: mol_type = other DNA
ttataggtgtgagttatttggtttttttttttttttttttttttttttgagatgaagttttatttttgttttttaggttggagtgtaaaggtgtaattttggtttattataatttttattttttgggtttaggtaatttttttgttttaatttttggagtagttgggattataggtgtttgttattaggtttggttaattt

SEQ ID NO: 15469 - DNA, 201 bp, synthetic construct
  misc_feature 1..201: note = Description of Artificial Sequence: Synthetic polynucleotide
  source 1..201: mol_type = other DNA
attatttggtttagtaggtagaggtgtaggaatatggggatggatagtagtatgtttatgttggttttggttattgagggtgtgtatgtgaaggttagttgtgttgtttatgtgaagtggtagtggttgggtattgggtgaatggtgtatattgttagttttagtgagatgaggaatatgtgtttgtaggttatggtgatg

SEQ ID NO: 15470 - DNA, 201 bp, synthetic construct
  misc_feature 1..201: note = Description of Artificial Sequence: Synthetic polynucleotide
  source 1..201: mol_type = other DNA
gtagttttagttattttaaaggtagaggtgagaattgtttgaatttggaaggagtaggttttagtgagttgaggttatgttatttttttttagtttgggtgatagagaaagattttgtttagaaaaagtaaattatgggagttggtgttggtgagtgttgtttgggaggtagtggttggaggagtggatgggttttgtggg

SEQ ID NO: 15471 - DNA, 201 bp, synthetic construct
  misc_feature 1..201: note = Description of Artificial Sequence: Synthetic polynucleotide
  source 1..201: mol_type = other DNA
gaggttgaggtaggagaatggtgtgaatttgggaggtggagtttgtagtgagttgagattttgttattgtattttagtttgggtgatagagtgagattttgttttaaaaaaaaaataaaaataaaaataaaataaaataaaaaatgagttgggtatgatggtataagtttgtggttttagttatttaggaggttgaggtgg

SEQ ID NO: 15472 - DNA, 201 bp, synthetic construct
  misc_feature 1..201: note = Description of Artificial Sequence: Synthetic polynucleotide
  source 1..201: mol_type = other DNA
gtagtttaataattttgtgttgtaaatttaaatattttatatattattagatattaaaaataaagatttatgttgtttgtttttatggagtgaggattttgttgattttatatttggttatgaatttgtttgaggtttattagttgaatgtttttggttaagaaagtttgttgagtgggggtggtttttaaattattattt

SEQ ID NO: 15473 - DNA, 201 bp, synthetic construct
  misc_feature 1..201: note = Description of Artificial Sequence: Synthetic polynucleotide
  source 1..201: mol_type = other DNA
gtgtattttggtttattataatttttattatatttgttttttttaggtttaagtgatttttttattttagtttttttagtagttgggattataggtgtatggtattatgattggttaatttttgtattttttgtagagatgggattttgttatgttatttaggttggttttgaatttttaagttaaagtaatttgtttgtt

SEQ ID NO: 15474 - DNA, 201 bp, synthetic construct
  misc_feature 1..201: note = Description of Artificial Sequence: Synthetic polynucleotide
  source 1..201: mol_type = other DNA
ttttatttttattaaaaatataaaaaattagttaggtgtggtggtatgttttgtaattttagttatttgggaggttgaggtaggagaattgtttgaatgtgggttggggaggttgtggtgagttgagattgtattattgtattttagtttgggtgatagtgtaagattttattttaaaaaaaaaaaaaatttgttaattta

SEQ ID NO: 15475 - DNA, 201 bp, synthetic construct
  misc_feature 1..201: note = Description of Artificial Sequence: Synthetic polynucleotide
  source 1..201: mol_type = other DNA
tatgtattatttatatgagtttttagtaggttttggttttaaataggtatatgtgtatttttttagttttttattgggatttttttgttaagttatgtttgatgtttttgtttatagttatgagttgtagtaagatgtttaggtttggtgttagtgtgtgtagtatgtgtgttagtattgtggaatttttgttgtttgagg

SEQ ID NO: 15476 - DNA, 201 bp, synthetic construct
  misc_feature 1..201: note = Description of Artificial Sequence: Synthetic polynucleotide
  source 1..201: mol_type = other DNA
tggtattttggaaggttgatgtgggggtattatttgagattaggggtttgagattagttttgtgaatgtgatgaaattttgtttttattgaaaatttaatgattagttgggggtggtggtgtatgtttgtaattttagttatttaggaggttgaggtaggagaattgtttgaatttggaaggtggaagttgtaatgagttg

SEQ ID NO: 15477 - DNA, 201 bp, synthetic construct
  misc_feature 1..201: note = Description of Artificial Sequence: Synthetic polynucleotide
  source 1..201: mol_type = other DNA
ttgaggtgggttgggtgtggtggtttatgtttgtaattttaatattttgggaggttgaggggggtggattatttgaggtgggtttggtgtggtggtttatgtttgtaattttaatattttgggaggttgagaggggtggattatttgaggtgggttgggtgtggtggtttatgtttgtaattttaatattttgggaggttg

SEQ ID NO: 15478 - DNA, 201 bp, synthetic construct
  misc_feature 1..201: note = Description of Artificial Sequence: Synthetic polynucleotide
  source 1..201: mol_type = other DNA
ggggttttggttaggggtgggtgaggttggtgtttttttaggttttttttagttataggtagtaggtgttatgggagttttgttggtattttttttttttgttagggttttggtttatttgatggtgtagtttttttttaaggtgtgtattggtgtagatattgtgtaggaagttaggttgatgtagatggtttttaagtc

SEQ ID NO: 15479 - DNA, 201 bp, synthetic construct
  misc_feature 1..201: note = Description of Artificial Sequence: Synthetic polynucleotide
  source 1..201: mol_type = other DNA
aaagttgtttaaagttttataatgagttgatttattgggaataggaggaggttttgttgttagtttttgtgttatatttggtattttgtttaggtttattggagaggagattatatgttttttttttagtttttttaatttttttagttaagataggtgttattatttattttagttttagtgtgttttgagtgtgttgga

SEQ ID NO: 15480 - DNA, 201 bp, synthetic construct
  misc_feature 1..201: note = Description of Artificial Sequence: Synthetic polynucleotide
  source 1..201: mol_type = other DNA
tatttttttgttttagttttttgagtagttgggattataggtgtttgttattgtgtttggttaattttttgtatttttttagtagagatggggttttattgtggttttgattttttgattttgtgatttgtttattttggttttttaaagtgttgggattataggtgtgagttattgtgtttggttgtgtgtgttttttaa

SEQ ID NO: 15481 - DNA, 201 bp, synthetic construct
  misc_feature 1..201: note = Description of Artificial Sequence: Synthetic polynucleotide
  source 1..201: mol_type = other DNA
gtatgtggtagtaggatttatttttggggtgttttgggttggtgaatttatatttttttatgttaatggtttgtagtatttgtagtttgtgggttgagttggttgtggggggtttattggtggtaggggtattattggggagagtggtggatggttgggttggtggtggtggaggtagtaggggttttgttatgtggttgt

SEQ ID NO: 15482 - DNA, 279 bp, synthetic construct
  misc_feature 1..279: note = Description of Artificial Sequence: Synthetic polynucleotide
  source 1..279: mol_type = other DNA
ggtggaagagttgatagtaaggggagtggttaaatggaggtggggtttggaagggggtgtggtttgtgggtttttgggttgtttggtttttttaggtgttgtagtggaaggtttggagtagaggttgtttttttgtttaagtattttttgggtgagtttatatttttggtgtgagtatgatttttttttttagggaaggttgggttttttgttggggtttgatttgattttttttttttatttttttttttttgttttatatttagtgagtttaggttt

SEQ ID NO: 15483 - DNA, 201 bp, synthetic construct
  misc_feature 1..201: note = Description of Artificial Sequence: Synthetic polynucleotide
  source 1..201: mol_type = other DNA
ttatatgggaggttgaggttagagaatggtgtgaatttgggaggtagagtttgtagtgagttgagatggtattattgtattttagtttgggtgatagagtgagatttagttttaaaaaaaaaaaaaaaaaaaaaggaaaatttaggtttttttttagattgaaatttttgtaaatataatttatgattttatagtagttag

SEQ ID NO: 15484 - DNA, 201 bp, synthetic construct
  misc_feature 1..201: note = Description of Artificial Sequence: Synthetic polynucleotide
  source 1..201: mol_type = other DNA
ttttgttgtaaaagaagtgtttatagaatttttatttttttttattattattattttttgagatagagttgttgttgtttgggttggagtatagtggtatgattttggttaattgtaagttttgttttttgggtttatgttatttttttgttttagttttatttttttgttttgttttgttttgttttgttttgtttttga

SEQ ID NO: 15485 - DNA, 201 bp, synthetic construct
  misc_feature 1..201: note = Description of Artificial Sequence: Synthetic polynucleotide
  source 1..201: mol_type = other DNA
gtttttttaatattttgaaatttaaagtgtgatagttttagaggattattaatataagtattatttgaaaatttgttagaaatgaagaattaggttgggtgtggtggtttatgtttataattttagtattttgggaggtttagatgggaggattatgatattaggagattgagattattttggttaatatggtgagatttc

SEQ ID NO: 15486 - DNA, 201 bp, synthetic construct
  misc_feature 1..201: note = Description of Artificial Sequence: Synthetic polynucleotide
  source 1..201: mol_type = other DNA
tatggtgaaaatttgttttttttaaaaatataaaaattagttaggtgtagtggtatgtgtttgtagatttagttatttgggtggttgaggtaggagaattgttggaatttgggaggttgaggttgtagtgagttgagattgtattattgtattgtagtttgggtgatagaataagattttaatttaaaaataataataata

SEQ ID NO: 15487 - DNA, 201 bp, synthetic construct
  misc_feature 1..201: note = Description of Artificial Sequence: Synthetic polynucleotide
  source 1..201: mol_type = other DNA
tttgtttaggaaatgtatataggagttggttattttgtgttttgagtttttttggaggtgttggatttttagagagagaaatagagatatgtaagagggtgaagatgttttagtggtgatatattggggagttttgtttatgatttgtttatgattggtatatttaatttgttttatggaattttattttatagtttggtt

SEQ ID NO: 15488 - DNA, 201 bp, synthetic construct
  misc_feature 1..201: note = Description of Artificial Sequence: Synthetic polynucleotide
  source 1..201: mol_type = other DNA
tgttaggataagtgagggtggtttgagttttgtgtttatatggtgtatgttgtttagtagatgatattgatggttgtaaatgttgtagggaatatagtgtgggtgtaaatgttaatggtgtttgtgttgatgggtttgagttgggtatggatgtttttttggttttttgagtgggttgttttttttttttttgtttttttt

SEQ ID NO: 15489 - DNA, 201 bp, synthetic construct
  misc_feature 1..201: note = Description of Artificial Sequence: Synthetic polynucleotide
  source 1..201: mol_type = other DNA
tttttgttgagagtggattttgtgtgtgtgttttttaggaatggtgataagtatgatggtgattgggtttgggattggtgttagggatatggggtgttgtgttgtgttgatggttttatttataaggtatttgggggtgtgtggtatttgttgtttagagggtataggttttgtggtgggtagggtgtgtggggtgtatgg

SEQ ID NO: 15490 - DNA, 201 bp, synthetic construct
  misc_feature 1..201: note = Description of Artificial Sequence: Synthetic polynucleotide
  source 1..201: mol_type = other DNA
gatattatattttatatttttttattttttttgatttggagttttgttttgttgtttaggtttgggtgtagtagtgtgattttggtttattgtaagttttgttttttgggtttatattatttttttgttttagttttttgagtagttgggattataggtgtttgttattatgtttggttaattttttgtatttgtagtaga

SEQ ID NO: 15491 - DNA, 201 bp, synthetic construct
  misc_feature 1..201: note = Description of Artificial Sequence: Synthetic polynucleotide
  source 1..201: mol_type = other DNA
tttttttttagaaagtatatgaataggttgggtatggtggtttatgtttgtaattttagtattttgggaggttgaggtgggtggattatgttagaagattgagattattttggttaatatggtgaaattttgtttttattaaaaatataaaaaaaaataagttgggtgtggtagtgggtgtttgtggttttagttattttg

SEQ ID NO: 15492 - DNA, 201 bp, synthetic construct
  misc_feature 1..201: note = Description of Artificial Sequence: Synthetic polynucleotide
  source 1..201: mol_type = other DNA
gtgtgagagttatatgttaggaataagaggtatgttgagaggtggttgggtatggtggtttatgtttgtaattttagtattttaggaggatgaggtgggtggattataaggttaggagattgagattattttggttaatatggtgaaattttgtttttattaaaaatataaaaaattagttgggtgtggtggtgggtgttt

SEQ ID NO: 15493 - DNA, 203 bp, synthetic construct
  misc_feature 1..203: note = Description of Artificial Sequence: Synthetic polynucleotide
  source 1..203: mol_type = other DNA
ttttataatgttttttattatttgtgagtatggtttgtaatgtggaagatataattttatttgattttttttagatttttttgttgttttagttttttatgtgttagtttttgggtttttattttaaatttttttaggtttagaatgttttgttttaaattttattgatattatttgtgaaattgtagttttttatgattaat

SEQ ID NO: 15494 - DNA, 201 bp, synthetic construct
  misc_feature 1..201: note = Description of Artificial Sequence: Synthetic polynucleotide
  source 1..201: mol_type = other DNA
attatatatggttgggtgtgatggtttatgttattgagtgattgttgtaattttagtattttgggaggttgagatgggaggattatgaggttaggagattgagattattttggttaatatggtgaaattttgtttttattaaaaaaataaaaatattagttgggtgtggtggtgggtgtttgtagttttagttatttggga

SEQ ID NO: 15495 - DNA, 201 bp, synthetic construct
  misc_feature 1..201: note = Description of Artificial Sequence: Synthetic polynucleotide
  source 1..201: mol_type = other DNA
agttttagttatttgggaggttgaggtaggagaatggtgtgaatttgggaggtggagtttgtagtgagttgagattgtgttattgtattttagtttgggtgatagagtgagattttgttttaaaaaataaaaataaataataataataattttagatattttataataatttttaggtataagagtttttatgagagtagg

SEQ ID NO: 15496 - DNA, 201 bp, synthetic construct
  misc_feature 1..201: note = Description of Artificial Sequence: Synthetic polynucleotide
  source 1..201: mol_type = other DNA
tgggggttttagaatttttgtagtttatatttttttggtttttttttgggtagtttggaggtttttgattttttggagtttttggtatttgagtttttttgtgaaagtttgtttgagaagggtttttgttttgggtttggtagattggagtttttttttgggttttttttttttttttttgggtgttttgttttttgttaa

SEQ ID NO: 15497 - DNA, 201 bp, synthetic construct
  misc_feature 1..201: note = Description of Artificial Sequence: Synthetic polynucleotide
  source 1..201: mol_type = other DNA
atgtgttattatgtttggttaatttttgtatttttagtggagatggggttttattatgttggttaggttggttttaaattttttattttgtgatttgtttgttttggttttttaaagtgttgggattataggagtgagttattatgtttggttttaattttagttttatagatgaaaaaatggaagtttaggattagtgat

SEQ ID NO: 15498 - DNA, 201 bp, synthetic construct
  misc_feature 1..201: note = Description of Artificial Sequence: Synthetic polynucleotide
  source 1..201: mol_type = other DNA
aagtagtatttggttttttgtttttgtgttaatttattttggataatggtttttagttgtatttatgttgttgtaaaggattggattttgttttttttatgattgtatagtattttatggtatatatatatatatattatatttttttaatttggtttatttatgtttttgttgttgtgaatagttttgtaatgaatatgt

SEQ ID NO: 15499 - DNA, 201 bp, synthetic construct
  misc_feature 1..201: note = Description of Artificial Sequence: Synthetic polynucleotide
  source 1..201: mol_type = other DNA
ttaaataaatgttgggtgttagggttgttgagtaagataataggttgtaaggatgtagtagaggatttttggttgatttgttgtgatggagtgagttagtggtgaggtttgaaggtttttgttttattttttttttggagtagaggttggggagggtgttgggtgttagtatagagtagagggttggttatggaattgggg

SEQ ID NO: 15500 - DNA, 201 bp, synthetic construct
  misc_feature 1..201: note = Description of Artificial Sequence: Synthetic polynucleotide
  source 1..201: mol_type = other DNA
gggagtgtagtggtgtgattttggtttattgtaatttttgttttttgggtttaagtgatttttttgttttagtttttttagtaggtaggattatagttgtgtgttattatatttggttaattttttgtatttttagtagagattgggttttattatgttagttagaatggttttaatttattgattttgtgatttgtttgt

SEQ ID NO: 15501 - DNA, 201 bp, synthetic construct
  misc_feature 1..201: note = Description of Artificial Sequence: Synthetic polynucleotide
  source 1..201: mol_type = other DNA
ttagtagaaatagggttttattatgttggttagaatggttttgattttttgattttgtgatttgtttgttttgtttttttaaagtgttgggattataggtgtgagttattgtgttttgtttattgtttatttttttttgtttgttttattttgattgttggggttttggatattatataaagagttagttggagagtgaga

SEQ ID NO: 15502 - DNA, 201 bp, synthetic construct
  misc_feature 1..201: note = Description of Artificial Sequence: Synthetic polynucleotide
  source 1..201: mol_type = other DNA
ggaatgtagtggtgttattttgttgattgtattttttgttttttggttgtaagtgatttttttgttttagtttttttagtagttgggattataggtgtgtgttataatatttagttaatttttgtatttttagtagagatgggtttttattaagttggttaggttggttttgaatttttgattttgtgatttgtttgtttt

SEQ ID NO: 15503 - DNA, 201 bp, synthetic construct
  misc_feature 1..201: note = Description of Artificial Sequence: Synthetic polynucleotide
  source 1..201: mol_type = other DNA
tattttggttttttaaagtgttggtgttataggtgtgaattattgtatttggtttgttttttattttattatttatttattttttttgagattgagttttgtttttgttgtttaggttggagtgtgtagtggtttaattttggtttattgtaaattttgttttttgggtttaagtgatttttttgttttagttttttgagt

SEQ ID NO: 15504 - DNA, 3238 bp, synthetic construct
  misc_feature 1..3238: note = Description of Artificial Sequence: Synthetic polynucleotide
  source 1..3238: mol_type = other DNA
tttttttttggattggtttaatttttttttttaagtttggtattttgtttttttttagtgggggatattttgttgttttggggtgtttgttgtgggtgttgtatgattttgggtgtaagttagagattttataaatatgttgggttttgtgtagtggtttttgggaaggtattgttatttgtgggagggtttggtttgttattttttattttttgttgttttaatgttattttttaagtttggtgtttttttttttttttttggaggtttttgtgttgttttggggtgttttttgtgggtgagatatataatttgggtgtaagttagggattttgtgattatttttggtttggtgtaggggtggttatttttgggatgatattattttgttatttttttttttggattgtttttattattttttttaattttggtgttttgtattttttttttagtggtttttttgttgttttgtggtgttttttgtgggtgagatatgtatttggggtgtaagatagggattttaggatgtttttgggtttattgtagaggttgttgggaaggtagtgttgtttgtgagaggattttagtatttttgttttttttttttggggttgttttaatttttttttttaagattgatgtgttgttttttttttttgggaatttttttgttgttttgtggtgtttgttgtgggtaagatatttattttgggtgtaagttagggaattaataatttttgtatgtttggtaaaggggttgttggtaaggtattgttatttgtgggattattttagttttgttgtttttttttttaggttatttaaatgtttttatttaagtttggtgttttgttgtttttttgtgggggattttttgttattttggggtgttttttgtgggtgagatatgtatattgtgtgtaagatagggattttgtgatttttttgggattggtataggggttgtagggaaggtattgttatttgtgaaaggattttagttttgttttttttttttttgggttgttttaatgtttttttttaagtttggtattttgtttttttttttttggggtttttttgttgttttggggtgttatttgtgggtgaggtatgtattttgggtgtaaattagggattttaagatttttagggttaggtgtaggggatgttgggaagttattgttttttgtggaaagtttttttttggattgttttaaagtttttttttaagtttggtattttgttttttttttttggagttttttttgtagtttttgtgtgtatatttaggtgagatatgtattttgttgtaagatagggattttaaatttttttgtttgggttaggtttaggggttgttgggaaggtattgtggtttgtgggatgattatagtttagttgttgtttttttttggttggtttaatgtttttttttaagtttgatatgttgttttttttttttgggggttttgttgttatttttatgtgtattttgtgagtaagataggtattttgggtttaagttaggggttttattgtttatttgggttttatttagaggttgttgggaaggtattgtttttagtggaaattttttttttggattgttttaatgtttttttttaagtttggtgttttgtttttttttatttggggattttttattgtattgtggtgtttattgtgggtatgatatgtattttgggtgtaagttagggattttataattattttaggtttgatgtaggggttattggataagatattgttgtttttgggatgatattggtttgttttaattttattttttaattttggagttttgtattttttttttgggggtttttttgttgttttgtggtgttatttgtgggtgagatatataatttgggagtaagttagagattttatgatatttttgggtttattgtagaggttgttaggaaggtggtgttatttgtgggaggattttagttttattatttttattttggggttgttttaattttttttttaagtttgatgtgttttttttttttttgggaatttatttgttgttttggggtgtttttttgagtgagatatgtattttgggtgtaagttatggattttaggattattttggtttagtgaaggggttgttaggaaggtattgttgtttgtgggagaaatttagtgttgttgtttttttttatgggttattttaaagtttttttttaagtttgaggtgttgttttttttttttaggggtttatttgttgttttggggtgttttttatgggtgaaatatgtattttgggtgtaagatagggattttatgatttttttgggtttagtgtagggattgttaggaaggtattgttatttgtaggaggaatttgattagttgtttttttttttgtgttgttttagtatttttattaaagtttggttttttgtggtgtttgtttggtggtttttttgttattttggggtgtttttatgggtgtgatttgtatttttggtgtaagttagggattttatgattattttgggtttgatgtaggggttgttgggaaggtattgttgtttatgggatgattttagtttgttatgtttttttttggattgttttaattattttttttaattttggtgttttatattttttttttggtggtttttttgttgttttgtggtgttttttgagggtgagatatgtattttgggtgtaagttaaggattttatgatgtttttaggtttattatagatgttgttgggaagatagtgttatttgtggtaggattttagtattttttttttatttttggggttgttttaatgtttttttttaagtttgatgtgttgttttttttttttgggaatttatttgttgttttggggtgttttttgtggaattttgggtgtaagtttgggatataataatttttttgggtttggtaaaggggttgttgggaaggtattgtggtttgtgggaagtttttttttggattgttttaaagtttttttttaagtttggtgttttgttttttttttagggggtatttttgttgttttggggtgtttttttgtgggtgtgatatgtattttgggtttaagttaggaattttatgataattttgagtttggtgtaggggttgttgggaaggtattgttgtttgtgtgatgattgttgtttgttgtttttttttttgtgttgttttaatgttattttttatgtttggtgtttta

SEQ ID NO: 15505 - DNA, 201 bp, synthetic construct
  misc_feature 1..201: note = Description of Artificial Sequence: Synthetic polynucleotide
  source 1..201: mol_type = other DNA
tgttattttgtttggttaattttgtgtgtgtgtgtttttagtagagatggggttttattgtgttagttaggatggttttgattttttgattttgtgatttgttttttttggttttttaaagtgttgggattataggtgtgagttattgtgtttggttttttgtatattattttttgagatattttgaggtaatagttttgg

SEQ ID NO: 15506 - DNA, 201 bp, synthetic construct
  misc_feature 1..201: note = Description of Artificial Sequence: Synthetic polynucleotide
  source 1..201: mol_type = other DNA
tgatgtttaagtatttgagaatggtgattaattattttggagagtatttgtaaaggtggttttttagttgttttttttggaagttgtagtttttgtgtttgtttttgtattttgtatatttgttgaggtggggtgtgttaattattaaattattaatgagtgatggtttaaattgtaggtagagtaatgaatagatggtgg

SEQ ID NO: 15507 - DNA, 201 bp, synthetic construct
  misc_feature 1..201: note = Description of Artificial Sequence: Synthetic polynucleotide
  source 1..201: mol_type = other DNA
tgtaataagtttgggggttgattttgggtgtgttgggggtgagggggttatggtggagatggatatgggtgtggggtggttgagatttgtatggtttagtgggtattggtattgtggggtttttgtttttagaggattattgttttatattgaagtttttttttttgtatatttagagtttgatgtatttttaattattgt

SEQ ID NO: 15508 - DNA, 201 bp, synthetic construct
  misc_feature 1..201: note = Description of Artificial Sequence: Synthetic polynucleotide
  source 1..201: mol_type = other DNA
gggtgtggtggtgggtatttgtaattttagttatttgggaggttgaggtaggagaatggtgtgaatttgggaggtggagtttgtagtgagttgagattgtgttattgtattttagtttgggtgatagagtgagattttgttttaaaaaaaaaaaaaaaaaaaaagaagaagttagagtaaggaggtagaatgatttttagg

SEQ ID NO: 15509 - DNA, 201 bp, synthetic construct
  misc_feature 1..201: note = Description of Artificial Sequence: Synthetic polynucleotide
  source 1..201: mol_type = other DNA
ggttagggtgtatgtggtgttggggtttggggggatgtttgttgttttggttgtattttggttatgtatatttttgggggtggttgttttattgtagggtgtgggggtggagtttggtttaagaagagtggtaaagggtgggtggttttggtggtttagtttagggtttgggagtgtttgggggtttttttgttttggggg

SEQ ID NO: 15510 - DNA, 201 bp, synthetic construct
  misc_feature 1..201: note = Description of Artificial Sequence: Synthetic polynucleotide
  source 1..201: mol_type = other DNA
aaaaagtaaaaaataaaaattagttggttatagtggtgggtgtttgtaattttaattgtttgggaggttgagttaggataatagtttgattttgtggggtggaggttgttatgagttaaaattgtgttattttattttaggttgggtgtaagagtgagattttgttttaaaaaaaaaaaaaaagttttatgttgggtgttg

SEQ ID NO: 15511 - DNA, 201 bp, synthetic construct
  misc_feature 1..201: note = Description of Artificial Sequence: Synthetic polynucleotide
  source 1..201: mol_type = other DNA
taggtgtgagttattgtgtttggttatttttgataattttattttaaatagtgataggttaaaagttaagagtggatgttttagtatttagttttttagtgttttgttagttattttaagtttgttgataggagtttgattttattgattttttttttttttagagttatgtttattttttaaaattttaagaagttgttt

SEQ ID NO: 15512 - DNA, 201 bp, synthetic construct
  misc_feature 1..201: note = Description of Artificial Sequence: Synthetic polynucleotide
  source 1..201: mol_type = other DNA
attttggaggttgaggtaggagaatggtgtgaatgtgggaggtggagtttgtagtgagttgagattgtgttttttgattttaggtgatttgtttgtttttgtatttggttaatttgtttttgtatatataatttttttattgtttaatatattttagggttttttaattttatattttatattttagtttttttaatagat

SEQ ID NO: 15513 - DNA, 201 bp, synthetic construct
  misc_feature 1..201: note = Description of Artificial Sequence: Synthetic polynucleotide
  source 1..201: mol_type = other DNA
tagggttttgttgtgttggttgggttggtttttagtttttaattgtgagtgatttgttaattttggttttttgaggtgttgggattgtagatggagttttgtttatttagtgtttaatggtgtttaggttggagtgtagtggtgtgattttggtttattataatttatattttttagttgtttgttttggttttttaaaat

SEQ ID NO: 15514 - DNA, 201 bp, synthetic construct
  misc_feature 1..201: note = Description of Artificial Sequence: Synthetic polynucleotide
  source 1..201: mol_type = other DNA
aggttgaggtaggtggattataaggttagaatattgagattattttgggtagtatgatgaaattttgtttttattaaaaaatataaaaaattagttgggtgtggtggttggtgtttgtagtattagttgtttaggaggttgaggtaggagaatggtatgaatttgggaggtggagtttgtagtgagttgagattgtgttat

SEQ ID NO: 15515 - DNA, 414 bp, Homo sapiens
  source 1..414: mol_type = unassigned DNA
ccgccagtgtccgtcgccttccacacgtggccgcagttctgtgcatggggccgcccgccatcctgccgcctctgacctgggctgtgggctcgtgacacgtgtctgagctttccagtcgtggccgtgacgctctgtgcggaggctccgtccgcgtgctgcctccgtcccctctgccctggacggccactcactacctttgtctctcaccctgggggtttcatgaccccggagcctccacgtcctggtacagagcctgcctctccgggactgggcttcggccgagcagacaccgcctagctgctctttgaccagcgttctctgctctgcgtctggctggcatcggcggcttgctgagtccagcctggcatctcgctggcatcggcggctcgctgggtccagcctggcgctgacacg

SEQ ID NO: 15516 - DNA, 987 bp, Homo sapiens
  source 1..987: mol_type = unassigned DNA
ccggagggtccccccgccgacaggccccacgtctcccacctgcaggacaatgaagtggccgccttgcagccccccgtggtgcagctgcacgacagcaacccctacccgcggcgggagcacccccaccccaccgcgcggccctggcgggcagatgacatcctggccagcccccctcgcctgcccgagccccagccctaccccggagccccgcaccacagctcctacgtgcacctgcggccggcgcgacccacaagcccacccgcccacagccaccgcgacttccagccggtggtgagtgcccccccaaagtgggcttggctccatctagcccctcggctctcggcagcagaagagggcccagcccctgcagagctgctgggggtcccaggcttcggccatgggtgggggtctggcggctcagggccactcagggcggcttggctggccctgggacttgccctctggtggccaagcagtggtcatgaaagtccagccgctgtcacatccttgaggaaccggcgtacctccgcctacagcggcagctgggggcacccacgtggcccggggctgctctgacctggcagcgtatgggggctgctgcctgggcccctcagtgtgtcacttgcgcgcctcccgctcagcgcccctcggccgtgcctgtccacacaggtgcggggccggggtggtgcgcccggggcctgggtgcagggggcagcgtgggacacagcccgtgacgcgcccctctccccgcagctccacctggttgcgctcaacagccccctgtcaggcggcatgcggggcatccgcggggccgacttccagtgcttccagcaggcgcgggccgtggggctggcgggcaccttccgcgccttcctgtcctcgcgcctgcaggacctgtacagcatcgtgcgccgtgccgaccgcgcagccgtgcccatcgtcaacctcaaggtgggtcagtccagtcctgagggcgcgggctcctcg

SEQ ID NO: 15517 - DNA, 1061 bp, Homo sapiens
  source 1..1061: mol_type = unassigned DNA
tcgctgttggtggggcccggggagccctgctgtggccgccactcaccaggtaggcggtgaaggcctcggcgtcggcatccaccagcgtggttagcttggccgaagcctcgcggaagggcgggatcaggcgccgcatcgtcgtgtccagggactggaattggcgccgcccgtaggtcatgaggcccaccatggagcccagcgccgcaccctgcgagaggggtggatgtgggggtcgcagggaccccagacggcccgggaccgaccccaggaagagccaggggcccgggtgatccctgcgggggtcccacccgtgtggcccccacgtctccacccagggcggccccaccgcgccctccccaccccgtgccctccccccaacagcgcccttccccctccccgccctccccccaacaactgcgcctcccctgcccctccccccgcgctcaccatggccgcagcggccgccgccaccgagccgcccccgggggccgcagagcgggcacccacctcccccacgaaggcgcgcagggacttgctgcccaggcctcgctcaggcccgcgctcagggaccaggtacctgcagggtgggcgcggctcagcgggtctggccggggttggtggggggagcgcagtcctcccggggcggccccaggccccacgcccgtctgcacccacggggaggtgaccactcggctgagaacctgcggggacccggccggggtctctgtgcccccctcagcccccagaccccggcttggcgcaggccgagtaggcgcccaaagggaggcgctgggaggactcagccgggtctccacgcagggaccccagcgccccgcaaggcccgagaggcagagcccgggaggggtgagaagagggcgggagggcagaggctcactcgatgatccgctccttagggctgaaggggcacagggagtccaggcccagccggctcaccacctggaaaaggggcttggagtggaaacggcctcggcgcgtctccaccaccaggaaagcctcggaacccgcgggtcccacccttgcggcagccgccccctgccccg

SEQ ID NO: 15518 - DNA, 382 bp, Homo sapiens
  source 1..382: mol_type = unassigned DNA
gcgtgtttatcatccggcacacgggagacccacgcgtgtttactgtcgggcacaggggagacccacgcgtgtttactgttcggcacacgagagacccacgcgtgtttaccgtttggcacagggagacccacgcgtgtttactgtccggcacaggggagacccacgcgtgtttactgtccggcacagggagacccacgcgtgtttactgtccggcacaggggagacccacgtgtgtttactgtccggcacagggaagacccacgtgtgtttactgtccggcacacaggagacccacacggggcctgtttaccatccggcacacaggaggcccatgcatctttaccgtcaggcacacgggaaacccacgcgtgtttaccgtccg

SEQ ID NO: 15519 - DNA, 261 bp, Homo sapiens
  source 1..261: mol_type = unassigned DNA
acggaggacttttcgcccctgcggtcagctggaccaggtggccggcagcgagacggaacaagtagaccaggctgagggtgaaggcgcaggcgatcagcagcatggacaagaggttgccgcctgccacctcctccatcgcctggcccagcacctacccacccgcctgtagcaagcccagcagcatcatcccggccgccgccgccatttcactctgtcggagacactgaaggccgaggtcgccaccgatcctcctaatcgacg

SEQ ID NO: 15520 - DNA, 892 bp, Homo sapiens
  source 1..892: mol_type = unassigned DNA
acgcgggccttcctcccgaagcccgtttaggaggcagatggagcgactcgactcggaggacaggagggtgttcaggggccctggcgccacagttcccacaggatgaccttggagcgttcctggatttcgagctgccctggctaaggagccgcaccccagtcctcgcccgcagctcacgggaaatgaagttgtctggcctgaagacctgcccgaagggccccgagcgcacagagtccatggtgcccggctccagatccacgagcacagcgcgggacacgtacctgccacctgcgtggggcgggagggcatgagcgaggggagggccgcgttcccaggagggcggtgggggaaggacgggggtcgcaccgctggcctcgtggtggtgcacgttgatgcgctccagctgcaggtggctgtccccgtggtaggtgccagcggagtcgatggcatgttcatcagagatcacctcccagaactgcggagacgggaggggccagacaggccggggctgagtcacggaggcgccccagccgctctcccacccccatccgcacccccatccccaggccgccctgtccctggggtccacccccgccgcctcgccagccacccggttccaccgtccccggcagggagcccaggggccgcaatgcaggggcaccgcccccgccgctgccaacatcttccccggccacccggcaggcccgggctgggccctcagagccccggctgccaaccttggcgccgatctggttcccgcactgcccggtctgcgtgagcacaagctccctcgtggccaaggcaggattagggcggcaggagaagcgcgagaaggaggagcagacgcacagcgacccagcccggcctccgccaacgcttaaacagccccgcg

SEQ ID NO: 15521 - DNA, 682 bp, Homo sapiens
  source 1..682: mol_type = unassigned DNA
ccgggggcccacggtgtagcgggtcgtcagccgggccccgggccttctgggcagcaagggccctggcaggaccctgagggctgggccaaggagggcagttcgctccggggcacctgtcaggggccccacacggctgcttttaggccaggggtggcaaagacgctgctgccgcctgctctgggctcggctcccatggctgtgaaggaccctcgtcactccccgtcgcctgcctgggctgcccggggaccctcctgctgcgtcagcacagagcctggaaccgcggccaaggcaggaagctcccctgtgaaggcaccaagcacggcagacgccctcacatcgccggggcccgtttccctgtggacgggaagtgggaacgtgacgtggacgtgacgtgggaacgtaacgtgacgtgacgtgacgtgacgtggcatggcgcgaggacagcgcggcgggagcggcgcctcagatccagcagggagggagacgaaaggcggatggaagaggggcccccggaccccgcccctcgaggcttgtgtgccgccctggctgcggcgttctgggcgacgggaaacagagtcaggacacagaccagggagggccggggcagagccagggcacctgcgggcgaggacggctgggtgctgggtccccggcgtcagggcgcaatgccgcctgctgggcg

SEQ ID NO: 15522 - DNA, 223 bp, Homo sapiens
  source 1..223: mol_type = unassigned DNA
acgcgcctcggtaggacctttactccacgtgatccacttccgggtttgctgcgcaggacagaagccagtcccgggtggggcccccgaacatggtggcggggcctgggtgggacagaggcggggcgcgaggcggagagaccttgccctttagaacaggcaaagggcggggccgggaccagacctgtgcatctctccgcctcgcacccagcgcctctgtttttcg

SEQ ID NO: 15523 - DNA, 255 bp, Homo sapiens
  source 1..255: mol_type = unassigned DNA
gcggacagctcgaatgtactgcagaagcatccgcccatcagtgggttccatcgccgggcacaggcctgtgtgcccagggcagagcgcctggtgcatgctgtggagggcgtgggcaatggcgtacaccgcatcaatcacaaactgcaccttgccctcctgctcgtaggtggagtcccggccgatgcgttcctcgcctgtcctagggatgcccagagaaagtgtgcccggcccccatgcaccgaacccggcctcccg

SEQ ID NO: 15524 - DNA, 309 bp, Homo sapiens
  source 1..309: mol_type = unassigned DNA
ccgtccgtgcaccttggagacatagtagacgcactgctggaaggcgtacagcaccacctcctccagcaccgccatggcctcctcgctggccgtcagcgtgcaggagaacagcgattccttcgagcctgccgggagacagccacgccaatggtcacaacgggcacagcgctcaggaacgcagcaactcagccagccgccagctctttccctggcgcgggcaccacccaacgcgcccatctggggtccagatgcgataaactggccgagggactctgggccctggctgggacgagcgcagcaaacctgccg

SEQ ID NO: 15525 - DNA, 992 bp, Homo sapiens
  source 1..992: mol_type = unassigned DNA
ccgccctgcgctcagcagcacagcaccgtgggggtcagatagaggcgctcccgcctcccagccggggccagctccgggccccctcttcccccagaccggcacaggacccagaccgcccaccccagcacactgacccagacagtctcgcggatcagcctggctatcttgagcaggagctgcccgaatgtgcccggctggaagtgggtggccgagtgctggatgcagaggcacaggaggaaggcgggggtcagcttgtggtcgtcgccccccggctcgatcaacgtcatgatcctctgcagcagcgtgtcctccaggtggggctcaaactccaggagcagctgctggcgccggggcagggcggcctgagtaggggaggcggctccccgggccccgagcgcggccccgcacagccggcagctctgcggcacagcccggaggcgcgccaaggcccgggcgggcaggggctgggcctgcgcggggtccttgaatagcagcaggtagtagagccccagggagagcaggtccccgtggtgcagcaccacggtcctgtgccccacctcggagaagttgacggagatgtgcgccccggggatgggctccaggaccagcctccccgcggcctggccgctgtccgggagcggttgccggcggatggtgcagtgtagaggcaggatgtcgggggctgagaggctgatgctgggcttgctggagggggtccgctggcccaccgtgtgccggtcccggttgagcacatacaccaggctgtcctgaaacagagactccgctcagggcaggcgtaacgcgagcagcacacgggaaaagcgtcccgtgtctagtcactggttgctgaagcagcgtggctgggatgctgtcgccacgggctctccatgtccctggccacccccacaccagaaccccgacggctctcaggaacccgcccctcgatgtccgggcccatcccagaggaggtcggtttcccggaggagcacacg

SEQ ID NO: 15526 - DNA, 265 bp, Homo sapiens
  source 1..265: mol_type = unassigned DNA
ccgcgtcctgcgctcctggttttctcctcttctagtgtcttccccacctggcgtcgcccggccgcaaccctggccctcctggggaagaggttcggaccctactctttatttgacatgaagaggttcggactcccagttttattcggcatgttcacgggcagcagccccattttgtttggcgtgttcacgggcagcagccctgttttattcggcgtgttcacggtcagcagccccgttgtgcttggcgtgttcacgggcagccccg

SEQ ID NO: 15527 - DNA, 488 bp, Homo sapiens
  source 1..488: mol_type = unassigned DNA
ccggcggaggcgggcgtggtgggggaggggctctctcttttgcccttttacccctctggtaggcgccctagggcgggggtgctgccgcgcgcttcggcgcgccttggttctgtcaccagccccactggggcctcacaatcgctcagccgtccagtgcgcgcctggagaaagagaagtgggcgactacggagcagcgtctccattactgaccgttttctcgccattgtacccacacaacttgctctaaatgggcaatttattaagtatattttgtccctgttcccgccgcaggcccctgccggaccgtcgcccacaagctcccatagcccgtgagtcctctcagcctggcccggctcaccctgtggcgcccacgtctaccccgggccctttccgattcctctttaaccctcagcagagtcgcgggccttctccagtcagcttctacagcgcgcctaggagaccgtgtcctctcccgccagacacgggcg

SEQ ID NO: 15528 - DNA, 676 bp, Homo sapiens
  source 1..676: mol_type = unassigned DNA
ccgctacctggacatgacggactgcttcgtgctggaggacgaaggcctgcacaccatcgcggcgcactgcacgcagctcacccacctctacctgcgccgctgcgtccgcctgaccgacgaaggcctgcgctacctggtgatctactgcgcctccatcaaggagctgagcgtcagcgactgccgcttcgtcagcgacttcggcctgcgggagatcgccaagctggagtcccgcctgcggtacctgagcatcgcgcactgcggccgggtcaccgacgtgggcatccgctacgtggccaagtactgcagcaagctgcgctacctcaacgcgaggggctgcgagggcatcacggaccacggtgtggagtacctcgccaagaactgcaccaaactcaaatccctggatatcggcaaatgccctttggtatccgacacgggcctggagtgcctggccctgaactgcttcaacctcaagcggctcagcctcaagtcctgcgagagcatcaccggccagggcttgcagatcgtggccgccaactgctttgacctccagacgctgaatgtccaggactgcgaggtctccgtggaggccctgcgctttgtcaaacgccactgcaagcgctgcgtcatcgagcacaccaacccggctttcttctgaagggacagagttcatccggcg

SEQ ID NO: 15529 - DNA, 1238 bp, Homo sapiens
  source 1..1238: mol_type = unassigned DNA
gcggcccaaaggcaccggacgttggggccaagatgacctccgcgctgccatgaaccaggccattggacgcgggctccgcgccgagcctgcagtcctcgaggagtctctcgggttcctccgttttgatcacaccttctcggatggctgccgggcttttgcctgccccgccttgcatcgagtctctcatgacctcctccgcctccagcttgcccttctcgtcccctcggaagtagccgagggccggcccggggccttccaacttgaccaccctggaggctctaggaccggtttcgacggcccctcgaggccccactgactgatccaggctgggccccagcttctgcttcttggccttgacatgcagcgccaggggctgcaccgggtgcaactcgggcctggaggtggcgccgtctgacgctgtcggcggctgcaggagccgcaggtcgggcctgaactgcaacagccgcgcctgcgcggacgaggcagcggcttcctcgttctgggcctgaggctgtggtagcagcaacacctgctctggcttcacctgcagcagccgccgcaccgcgggctgtaagccggacgccactgcctccccgcacgacgaggccaaggtcgcactggctgccgcgctcagtgtgggagacgacggagggggctccatggctgctgcccaaaaggaggtgccctcgaccggcagcgggggcggagcgggacgcaacgggcgcggctgaggcggcggctcgggtctggctctctccatgggggagggggacgccccggccaggattgtgagctcagccgtttgttggcgaccttccccctccccctttcggttaagagccttgcaaggcctttgctacccagaaccctacgcggttcaaaacgcagctgtctgtctgggcctcacccaatcacaacgaccgatacccgtggacggccaatcacaggcgggttttccggctcttcctggtccctactctcgcctcgtgctgagtcctcgaatcacctgccatggtaggagccgccgcacttgttgcacattttcgttctgactctcttgtggagttctcttacagccgttgtctttagtcatccctcccccacccggagctgcgacaatggcgttgcccaggaaacgttgcgcttccaggccgctgacatccagggaatgaagtcttgcgtcacaaggggagcgacggccttgtgcacgcgctctgtgcggcctgagtaatctgtcg

SEQ ID NO: 15530 - DNA, 220 bp, Homo sapiens
  source 1..220: mol_type = unassigned DNA
acgctcatcgtctcgcaggcagctccagctcgagtggtggccgtgctgggtctgtgcccggggccttcccccgtatgctttcgctttctagtgtctgcgatgacgtgcgattcactaatcacccggactcagcgcatctctatgttaaatagcgcgtgtccatctgcaaagcacacgacagcccctgcggccactgggtgccggcgcccagcctgtcccg

SEQ ID NO: 15531 - DNA, 631 bp, Homo sapiens
  source 1..631: mol_type = unassigned DNA
gcggtgaggggtgatttcggaggaggcagagccccgggtgtccgtgggaagctccaaagccgggccgcgggacggctaccctgggctgtgacgcagtccaggatcttcgccaaggcacctgctggaggcccctcctgggtcccacgaccccgactgcgcctgccggctgccagcgaggaggcggggccaaggcgagggcggggccgaggcaggaggggcggggtcggcctgatgggcggggcttccgtgtgggcggggctgctggccctgcggtctgagccagcggggagaggcccgggcggaggaggctgcggactcctagaggttcagtgccggaagttgggcctggaaagggggcaccgccttcccggttctggtggcggggagtgaggggacgggcgaaagcggcacagggaacagcatgacacgggcctgaggcagggcacatttggaaaggggcgaggagagggcagtggcttctggcacggcagcagtgggcatacagaggcagtcgggacccgtctggaagagcctccgcccggggtaaggagccgggactgtgtctaggaggcagtggggagctccggagagcgaagcgcctcctgcgcagactcgcgtgcttggagtaccg

SEQ ID NO: 15532 - DNA, 904 bp, Homo sapiens
  source 1..904: mol_type = unassigned DNA
acggcgtctgcctctcgctcttggagtgctcctggcctaacgcagcagtttcgcagataaacgttacagaaggtagagcgctctacagatatgaaggagtggcccgtggtttcacgtagaacaaattacttccggcagaaagatcaggaaagtttcgaaatcgcggagttctcaagggatgggcagaacgggcgggtgagcagggccaagcgcctcctggacagtgaccatcccggagcctggggacgcgctggggggcaggagctgtcccactcgttcaggcgagggtctgggaagggaccccaagcgggaggccgacgctgcctgggtcctcccttggggcggccgcctccccattcaccccgagcatcccgaaacctggaaaggagcaaagctgaagcgatggccacgtgcatgacggcaggcagcctgcagattcgttgttaaactacactcacgccgggtctaacaggcgcgcacctgccggcacgccgcccgctgctgtgacctgggcagcgtcgggtctcaggcccccgcctctcgcgctgtgacagtgagaagccgagaaagtcatgtcacgtccgtctgaggaggcagctcctcagtgtggcagaaagaaatgcccactctccgagcaccagccaggacgtgtgcttaagccaacctgttcattcttccacctgatcccttatgtaatgtaacatgcatgtttcatccacaaaaatgagcagcgaaatccaccgacccagcaacatgttccgagacacgcaggagccttttccacggagccagctcccggccttcccctccaacatccaccccgcgctcgcgtagcccgggctcctgccattgcgctgccagctgggcggcacctttcaggcggggaaaagcgaatcttctgccg

SEQ ID NO: 15533 - DNA, 519 bp, Homo sapiens
  source 1..519: mol_type = unassigned DNA
acgtcactctctgggggcgcggtggggctgggcagggagcgcggcgcgtgtctgacacccatggctggttccctcccgccctccacagctgttcatggtggacaacggggctgatgactggcgcatcgccatgacctgcgagcgcgtgttcctcatctcgctagagctggcagtgtgcgccattcacccggtgcccggccactaccgcttcacgtggacggcgcggctggccttcacgtacgcgccctcggtggccgaggccgacgtggacgtgctgctgtccatccccatgttcctgcgcctctacctgctgggccgggtgatgctactgcacagcaaaatcttcacggacgcctcgagccgcagcatcggggccctcaacaagatcaccttcaacacgcgcttcgtcatgaagacactcatgaccatctgccccggcaccgtgctgctggtcttcagcatctcctcctggatcatcgcagcctggaccgtgcgcgtctgcgagaggtgcgaccgccg

SEQ ID NO: 15534 - DNA, 204 bp, Homo sapiens
  source 1..204: mol_type = unassigned DNA
ccgccgccagcccagccgtccgccactctccccagtggtgcccctgccaccaatgggccccccacaaccgactcggcccacgggctgcagatgctgcggaccattggcgtggggaagtatgagttcaccgacccggggcaccccagaggtaagtcctgctgccacgtgcctccccacgggcctgcgtctgcacctccctgcgcg

SEQ ID NO: 15535 - DNA, 444 bp, Homo sapiens
  source 1..444: mol_type = unassigned DNA
ccggccttcgtgcagatggacgtgaggaacgccattgtcctcttctccctctctgctgccggcgtcacgcaggagctggccatctcccgccggcagcgccgcgtcccggggaacctgatgggctcctacaggtcggtgggggtggagacaggggagacgaagaaggagggggcagcccgctcaggaggccaggggggcatccgtgcccggctcaggcccatcgacgcagacaccattgacatttacgcccgcgctgtgttccctgcggcgtttgcggccgtcaatgtcatctactgggcggcatacgccatgtgagcacaggactcaggccaccctcgcttgtcctggcgcccggcggcagctgcccagaaacttcctgggagaaagagccctcgggctgccttcccctctgcgtgtttcgaagtgggatgacagtcggccacg

SEQ ID NO: 15536 - DNA, 397 bp, Homo sapiens
  source 1..397: mol_type = unassigned DNA
acgcgccctgcccaccacgaggcctgtaccctctgggcagcaggtgccgcgcgcccccgggtaccttgtaggtggagccgtcggcgcagcgcagcaccccgtgtccctgacgccggtcccggacccagtcgccgtcgtacttgtcaccgttcctgggggacacacgcacggagtccactctcaacagggggagccgggtggtggcagtgactcagaccggctcctcccaccgggctccgcaggcactgcgggaccgaggcaaaaataggcccgagcagatggccccaagagctcctgcctcgccagggccagctgggggccgacgacaggcggtggggacacgtccgcccacccccaccctagatggtaggcctgctcgggacgcactcagcttccg

SEQ ID NO: 15537 - DNA, 1530 bp, Homo sapiens
  source 1..1530: mol_type = unassigned DNA
acgcatggaatcttcgagcctggagaacgtgctggagccctgcgcctacgcccccacctacgtggtcaaggacttcccgatcgccagataccagggcctgcaatttgtgagtgcggctggagaccccgtctcccgtccgggactccgcggagccttctccagccccttgggaggccgccccgggaggtccgcgccctgagccctgcgcccccccaccccccaggtgtacctgtccttcgtttatcccaacgactacactcgcctcacccacatggagacggacaacaagtgcttctaccgcgagtctccgctgtatctggagaggtgggcgcgcggccgggctaatgcggggcggggtgggcggggcgggactcggctctgatgccccgccgcgccccaggtttgggttctataaatacatgaagatggacaaggaggagggggatgaggatgaagaagacgaggtgcagcgccgagccttcctcttcctcaacccggacggtgagtgtccgcagcgcccctggcccgcacccacctgcgcagggagcttctaacccgcgtttcccgcagacttcctggacgacgaggacgagggggagctgctcgacagcctggagcccaccgaggcggccccgcccaggagcggcccccagtcccccgccccagcagcccccgcccagcccggagccaccctcgccccgccgacccctccccgcccccgggacggggggacccccaggcactcccgggccctgagctgggccgccagggccgcccgccctttgccgctcttcttgggccgagctccgcccccgcgccctgcagtggagcagccgcccccaaaggtgtacgtgaccagggtgcggccgggacagcgggcatccccccgggccccagcgccgcgtgcgccctggccgcccttccctggcgtcttcctgcaccccaggcctctgcccagagtgcagctgcgggcgcccccacgcccaccccggccccacggccgcaggaccggcggcccccaggccacacagccgaggcccccagcccgggcgcaggccacccaagggggccgggagggccaggcgcgcacgctgggacctgcggcgcccacagtggactcaaacttgtcctccgaagcgcggcccgtgacctccttcctgagcttgtcccaggtgtccgggccgcagctgcccggggagggcgaagaggaggaggaaggggaggacgatggggccccgggcgacgaggccgcgtcggaggacagcgaggaggccgcgggcccggcgctcggacgctggcgtgaggacgccatcgactggcagcgcacgttcagcgtgggcgccgtggacttcgagctgctgcgctcggactggaacgacctgcgatgcaacgtttcggggaacctgcagctgccggaggcggaggccgtggacgtgaccgctcagtacatggagcggctgaacgcgcgccacggcgggtatgggggcggccgaacgcgcgccagggcggttttggaggcggggacagccg

SEQ ID NO: 15538 - DNA, 414 bp, Homo sapiens
  source 1..414: mol_type = unassigned DNA
cgtgtcagcgccaggctggacccagcgagccgccgatgccagcgagatgccaggctggactcagcaagccgccgatgccagccagacgcagagcagagaacgctggtcaaagagcagctaggcggtgtctgctcggccgaagcccagtcccggagaggcaggctctgtaccaggacgtggaggctccggggtcatgaaacccccagggtgagagacaaaggtagtgagtggccgtccagggcagaggggacggaggcagcacgcggacggagcctccgcacagagcgtcacggccacgactggaaagctcagacacgtgtcacgagcccacagcccaggtcagaggcggcaggatggcgggcggccccatgcacagaactgcggccacgtgtggaaggcgacggacactggcgg

SEQ ID NO: 15539 - DNA, 987 bp, Homo sapiens
  source 1..987: mol_type = unassigned DNA
cgaggagcccgcgccctcaggactggactgacccaccttgaggttgacgatgggcacggctgcgcggtcggcacggcgcacgatgctgtacaggtcctgcaggcgcgaggacaggaaggcgcggaaggtgcccgccagccccacggcccgcgcctgctggaagcactggaagtcggccccgcggatgccccgcatgccgcctgacagggggctgttgagcgcaaccaggtggagctgcggggagaggggcgcgtcacgggctgtgtcccacgctgccccctgcacccaggccccgggcgcaccaccccggccccgcacctgtgtggacaggcacggccgaggggcgctgagcgggaggcgcgcaagtgacacactgaggggcccaggcagcagcccccatacgctgccaggtcagagcagccccgggccacgtgggtgcccccagctgccgctgtaggcggaggtacgccggttcctcaaggatgtgacagcggctggactttcatgaccactgcttggccaccagagggcaagtcccagggccagccaagccgccctgagtggccctgagccgccagacccccacccatggccgaagcctgggacccccagcagctctgcaggggctgggccctcttctgctgccgagagccgaggggctagatggagccaagcccactttgggggggcactcaccaccggctggaagtcgcggtggctgtgggcgggtgggcttgtgggtcgcgccggccgcaggtgcacgtaggagctgtggtgcggggctccggggtagggctggggctcgggcaggcgaggggggctggccaggatgtcatctgcccgccagggccgcgcggtggggtgggggtgctcccgccgcgggtaggggttgctgtcgtgcagctgcaccacggggggctgcaaggcggccacttcattgtcctgcaggtgggagacgtggggcctgtcggcggggggaccctccgg

SEQ ID NO: 15540 - DNA, 1061 bp, Homo sapiens
  source 1..1061: mol_type = unassigned DNA
cggggcagggggcggctgccgcaagggtgggacccgcgggttccgaggctttcctggtggtggagacgcgccgaggccgtttccactccaagccccttttccaggtggtgagccggctgggcctggactccctgtgccccttcagccctaaggagcggatcatcgagtgagcctctgccctcccgccctcttctcacccctcccgggctctgcctctcgggccttgcggggcgctggggtccctgcgtggagacccggctgagtcctcccagcgcctccctttgggcgcctactcggcctgcgccaagccggggtctgggggctgaggggggcacagagaccccggccgggtccccgcaggttctcagccgagtggtcacctccccgtgggtgcagacgggcgtggggcctggggccgccccgggaggactgcgctccccccaccaaccccggccagacccgctgagccgcgcccaccctgcaggtacctggtccctgagcgcgggcctgagcgaggcctgggcagcaagtccctgcgcgccttcgtgggggaggtgggtgcccgctctgcggcccccgggggcggctcggtggcggcggccgctgcggccatggtgagcgcggggggaggggcaggggaggcgcagttgttggggggagggcggggagggggaagggcgctgttggggggagggcacggggtggggagggcgcggtggggccgccctgggtggagacgtgggggccacacgggtgggacccccgcagggatcacccgggcccctggctcttcctggggtcggtcccgggccgtctggggtccctgcgacccccacatccacccctctcgcagggtgcggcgctgggctccatggtgggcctcatgacctacgggcggcgccaattccagtccctggacacgacgatgcggcgcctgatcccgcccttccgcgaggcttcggccaagctaaccacgctggtggatgccgacgccgaggccttcaccgcctacctggtgagtggcggccacagcagggctccccgggccccaccaacagcga

SEQ ID NO: 15541 - DNA, 382 bp, Homo sapiens
  source 1..382: mol_type = unassigned DNA
cggacggtaaacacgcgtgggtttcccgtgtgcctgacggtaaagatgcatgggcctcctgtgtgccggatggtaaacaggccccgtgtgggtctcctgtgtgccggacagtaaacacacgtgggtcttccctgtgccggacagtaaacacacgtgggtctcccctgtgccggacagtaaacacgcgtgggtctccctgtgccggacagtaaacacgcgtgggtctcccctgtgccggacagtaaacacgcgtgggtctccctgtgccaaacggtaaacacgcgtgggtctctcgtgtgccgaacagtaaacacgcgtgggtctcccctgtgcccgacagtaaacacgcgtgggtctcccgtgtgccggatgataaacacgc

SEQ ID NO: 15542 - DNA, 261 bp, Homo sapiens
  source 1..261: mol_type = unassigned DNA
cgtcgattaggaggatcggtggcgacctcggccttcagtgtctccgacagagtgaaatggcggcggcggccgggatgatgctgctgggcttgctacaggcgggtgggtaggtgctgggccaggcgatggaggaggtggcaggcggcaacctcttgtccatgctgctgatcgcctgcgccttcaccctcagcctggtctacttgttccgtctcgctgccggccacctggtccagctgaccgcaggggcgaaaagtcctccgt

SEQ ID NO: 15543 - DNA, 892 bp, Homo sapiens
  source 1..892: mol_type = unassigned DNA
cgcggggctgtttaagcgttggcggaggccgggctgggtcgctgtgcgtctgctcctccttctcgcgcttctcctgccgccctaatcctgccttggccacgagggagcttgtgctcacgcagaccgggcagtgcgggaaccagatcggcgccaaggttggcagccggggctctgagggcccagcccgggcctgccgggtggccggggaagatgttggcagcggcgggggcggtgcccctgcattgcggcccctgggctccctgccggggacggtggaaccgggtggctggcgaggcggcgggggtggaccccagggacagggcggcctggggatgggggtgcggatgggggtgggagagcggctggggcgcctccgtgactcagccccggcctgtctggcccctcccgtctccgcagttctgggaggtgatctctgatgaacatgccatcgactccgctggcacctaccacggggacagccacctgcagctggagcgcatcaacgtgcaccaccacgaggccagcggtgcgacccccgtccttcccccaccgccctcctgggaacgcggccctcccctcgctcatgccctcccgccccacgcaggtggcaggtacgtgtcccgcgctgtgctcgtggatctggagccgggcaccatggactctgtgcgctcggggcccttcgggcaggtcttcaggccagacaacttcatttcccgtgagctgcgggcgaggactggggtgcggctccttagccagggcagctcgaaatccaggaacgctccaaggtcatcctgtgggaactgtggcgccagggcccctgaacaccctcctgtcctccgagtcgagtcgctccatctgcctcctaaacgggcttcgggaggaaggcccgcgt

SEQ ID NO: 15544 - DNA, 682 bp, Homo sapiens
  source 1..682: mol_type = unassigned DNA
cgcccagcaggcggcattgcgccctgacgccggggacccagcacccagccgtcctcgcccgcaggtgccctggctctgccccggccctccctggtctgtgtcctgactctgtttcccgtcgcccagaacgccgcagccagggcggcacacaagcctcgaggggcggggtccgggggcccctcttccatccgcctttcgtctccctccctgctggatctgaggcgccgctcccgccgcgctgtcctcgcgccatgccacgtcacgtcacgtcacgtcacgttacgttcccacgtcacgtccacgtcacgttcccacttcccgtccacagggaaacgggccccggcgatgtgagggcgtctgccgtgcttggtgccttcacaggggagcttcctgccttggccgcggttccaggctctgtgctgacgcagcaggagggtccccgggcagcccaggcaggcgacggggagtgacgagggtccttcacagccatgggagccgagcccagagcaggcggcagcagcgtctttgccacccctggcctaaaagcagccgtgtggggcccctgacaggtgccccggagcgaactgccctccttggcccagccctcagggtcctgccagggcccttgctgcccagaaggcccggggcccggctgacgacccgctacaccgtgggcccccgg

SEQ ID NO: 15545 - DNA, 223 bp, Homo sapiens
  source 1..223: mol_type = unassigned DNA
cgaaaaacagaggcgctgggtgcgaggcggagagatgcacaggtctggtcccggccccgccctttgcctgttctaaagggcaaggtctctccgcctcgcgccccgcctctgtcccacccaggccccgccaccatgttcgggggccccacccgggactggcttctgtcctgcgcagcaaacccggaagtggatcacgtggagtaaaggtcctaccgaggcgcgt

SEQ ID NO: 15546 - DNA, 255 bp, Homo sapiens
  source 1..255: mol_type = unassigned DNA
cgggaggccgggttcggtgcatgggggccgggcacactttctctgggcatccctaggacaggcgaggaacgcatcggccgggactccacctacgagcaggagggcaaggtgcagtttgtgattgatgcggtgtacgccattgcccacgccctccacagcatgcaccaggcgctctgccctgggcacacaggcctgtgcccggcgatggaacccactgatgggcggatgcttctgcagtacattcgagctgtccgc

SEQ ID NO: 15547 - DNA, 309 bp, Homo sapiens
  source 1..309: mol_type = unassigned DNA
cggcaggtttgctgcgctcgtcccagccagggcccagagtccctcggccagtttatcgcatctggaccccagatgggcgcgttgggtggtgcccgcgccagggaaagagctggcggctggctgagttgctgcgttcctgagcgctgtgcccgttgtgaccattggcgtggctgtctcccggcaggctcgaaggaatcgctgttctcctgcacgctgacggccagcgaggaggccatggcggtgctggaggaggtggtgctgtacgccttccagcagtgcgtctactatgtctccaaggtgcacggacgg

SEQ ID NO: 15548 - DNA, 992 bp, Homo sapiens
  source 1..992: mol_type = unassigned DNA
cgtgtgctcctccgggaaaccgacctcctctgggatgggcccggacatcgaggggcgggttcctgagagccgtcggggttctggtgtgggggtggccagggacatggagagcccgtggcgacagcatcccagccacgctgcttcagcaaccagtgactagacacgggacgcttttcccgtgtgctgctcgcgttacgcctgccctgagcggagtctctgtttcaggacagcctggtgtatgtgctcaaccgggaccggcacacggtgggccagcggaccccctccagcaagcccagcatcagcctctcagcccccgacatcctgcctctacactgcaccatccgccggcaaccgctcccggacagcggccaggccgcggggaggctggtcctggagcccatccccggggcgcacatctccgtcaacttctccgaggtggggcacaggaccgtggtgctgcaccacggggacctgctctccctggggctctactacctgctgctattcaaggaccccgcgcaggcccagcccctgcccgcccgggccttggcgcgcctccgggctgtgccgcagagctgccggctgtgcggggccgcgctcggggcccggggagccgcctcccctactcaggccgccctgccccggcgccagcagctgctcctggagtttgagccccacctggaggacacgctgctgcagaggatcatgacgttgatcgagccggggggcgacgaccacaagctgacccccgccttcctcctgtgcctctgcatccagcactcggccacccacttccagccgggcacattcgggcagctcctgctcaagatagccaggctgatccgcgagactgtctgggtcagtgtgctggggtgggcggtctgggtcctgtgccggtctgggggaagagggggcccggagctggccccggctgggaggcgggagcgcctctatctgacccccacggtgctgtgctgctgagcgcagggcgg

SEQ ID NO: 15549 - DNA, 265 bp, Homo sapiens
  source 1..265: mol_type = unassigned DNA
cggggctgcccgtgaacacgccaagcacaacggggctgctgaccgtgaacacgccgaataaaacagggctgctgcccgtgaacacgccaaacaaaatggggctgctgcccgtgaacatgccgaataaaactgggagtccgaacctcttcatgtcaaataaagagtagggtccgaacctcttccccaggagggccagggttgcggccgggcgacgccaggtggggaagacactagaagaggagaaaaccaggagcgcaggacgcgg

SEQ ID NO: 15550 - DNA, 488 bp, Homo sapiens
  source 1..488: mol_type = unassigned DNA
cgcccgtgtctggcgggagaggacacggtctcctaggcgcgctgtagaagctgactggagaaggcccgcgactctgctgagggttaaagaggaatcggaaagggcccggggtagacgtgggcgccacagggtgagccgggccaggctgagaggactcacgggctatgggagcttgtgggcgacggtccggcaggggcctgcggcgggaacagggacaaaatatacttaataaattgcccatttagagcaagttgtgtgggtacaatggcgagaaaacggtcagtaatggagacgctgctccgtagtcgcccacttctctttctccaggcgcgcactggacggctgagcgattgtgaggccccagtggggctggtgacagaaccaaggcgcgccgaagcgcgcggcagcacccccgccctagggcgcctaccagaggggtaaaagggcaaaagagagagcccctcccccaccacgcccgcctccgccgg

SEQ ID NO: 15551 - DNA, 676 bp, Homo sapiens
  source 1..676: mol_type = unassigned DNA
cgccggatgaactctgtcccttcagaagaaagccgggttggtgtgctcgatgacgcagcgcttgcagtggcgtttgacaaagcgcagggcctccacggagacctcgcagtcctggacattcagcgtctggaggtcaaagcagttggcggccacgatctgcaagccctggccggtgatgctctcgcaggacttgaggctgagccgcttgaggttgaagcagttcagggccaggcactccaggcccgtgtcggataccaaagggcatttgccgatatccagggatttgagtttggtgcagttcttggcgaggtactccacaccgtggtccgtgatgccctcgcagcccctcgcgttgaggtagcgcagcttgctgcagtacttggccacgtagcggatgcccacgtcggtgacccggccgcagtgcgcgatgctcaggtaccgcaggcgggactccagcttggcgatctcccgcaggccgaagtcgctgacgaagcggcagtcgctgacgctcagctccttgatggaggcgcagtagatcaccaggtagcgcaggccttcgtcggtcaggcggacgcagcggcgcaggtagaggtgggtgagctgcgtgcagtgcgccgcgatggtgtgcaggccttcgtcctccagcacgaagcagtccgtcatgtccaggtagcgg

SEQ ID NO: 15552 - DNA, 1238 bp, Homo sapiens
  source 1..1238: mol_type = unassigned DNA
cgacagattactcaggccgcacagagcgcgtgcacaaggccgtcgctccccttgtgacgcaagacttcattccctggatgtcagcggcctggaagcgcaacgtttcctgggcaacgccattgtcgcagctccgggtgggggagggatgactaaagacaacggctgtaagagaactccacaagagagtcagaacgaaaatgtgcaacaagtgcggcggctcctaccatggcaggtgattcgaggactcagcacgaggcgagagtagggaccaggaagagccggaaaacccgcctgtgattggccgtccacgggtatcggtcgttgtgattgggtgaggcccagacagacagctgcgttttgaaccgcgtagggttctgggtagcaaaggccttgcaaggctcttaaccgaaagggggagggggaaggtcgccaacaaacggctgagctcacaatcctggccggggcgtccccctcccccatggagagagccagacccgagccgccgcctcagccgcgcccgttgcgtcccgctccgcccccgctgccggtcgagggcacctccttttgggcagcagccatggagccccctccgtcgtctcccacactgagcgcggcagccagtgcgaccttggcctcgtcgtgcggggaggcagtggcgtccggcttacagcccgcggtgcggcggctgctgcaggtgaagccagagcaggtgttgctgctaccacagcctcaggcccagaacgaggaagccgctgcctcgtccgcgcaggcgcggctgttgcagttcaggcccgacctgcggctcctgcagccgccgacagcgtcagacggcgccacctccaggcccgagttgcacccggtgcagcccctggcgctgcatgtcaaggccaagaagcagaagctggggcccagcctggatcagtcagtggggcctcgaggggccgtcgaaaccggtcctagagcctccagggtggtcaagttggaaggccccgggccggccctcggctacttccgaggggacgagaagggcaagctggaggcggaggaggtcatgagagactcgatgcaaggcggggcaggcaaaagcccggcagccatccgagaaggtgtgatcaaaacggaggaacccgagagactcctcgaggactgcaggctcggcgcggagcccgcgtccaatggcctggttcatggcagcgcggaggtcatcttggccccaacgtccggtgcctttgggccgc

SEQ ID NO: 15553 - DNA, 220 bp, Homo sapiens
  source 1..220: mol_type = unassigned DNA
cgggacaggctgggcgccggcacccagtggccgcaggggctgtcgtgtgctttgcagatggacacgcgctatttaacatagagatgcgctgagtccgggtgattagtgaatcgcacgtcatcgcagacactagaaagcgaaagcatacgggggaaggccccgggcacagacccagcacggccaccactcgagctggagctgcctgcgagacgatgagcgt

SEQ ID NO: 15554 - DNA, 631 bp, Homo sapiens
  source 1..631: mol_type = unassigned DNA
cggtactccaagcacgcgagtctgcgcaggaggcgcttcgctctccggagctccccactgcctcctagacacagtcccggctccttaccccgggcggaggctcttccagacgggtcccgactgcctctgtatgcccactgctgccgtgccagaagccactgccctctcctcgcccctttccaaatgtgccctgcctcaggcccgtgtcatgctgttccctgtgccgctttcgcccgtcccctcactccccgccaccagaaccgggaaggcggtgccccctttccaggcccaacttccggcactgaacctctaggagtccgcagcctcctccgcccgggcctctccccgctggctcagaccgcagggccagcagccccgcccacacggaagccccgcccatcaggccgaccccgcccctcctgcctcggccccgccctcgccttggccccgcctcctcgctggcagccggcaggcgcagtcggggtcgtgggacccaggaggggcctccagcaggtgccttggcgaagatcctggactgcgtcacagcccagggtagccgtcccgcggcccggctttggagcttcccacggacacccggggctctgcctcctccgaaatcacccctcaccgc

SEQ ID NO: 15555 - DNA, 904 bp, Homo sapiens
  source 1..904: mol_type = unassigned DNA
cggcagaagattcgcttttccccgcctgaaaggtgccgcccagctggcagcgcaatggcaggagcccgggctacgcgagcgcggggtggatgttggaggggaaggccgggagctggctccgtggaaaaggctcctgcgtgtctcggaacatgttgctgggtcggtggatttcgctgctcatttttgtggatgaaacatgcatgttacattacataagggatcaggtggaagaatgaacaggttggcttaagcacacgtcctggctggtgctcggagagtgggcatttctttctgccacactgaggagctgcctcctcagacggacgtgacatgactttctcggcttctcactgtcacagcgcgagaggcgggggcctgagacccgacgctgcccaggtcacagcagcgggcggcgtgccggcaggtgcgcgcctgttagacccggcgtgagtgtagtttaacaacgaatctgcaggctgcctgccgtcatgcacgtggccatcgcttcagctttgctcctttccaggtttcgggatgctcggggtgaatggggaggcggccgccccaagggaggacccaggcagcgtcggcctcccgcttggggtcccttcccagaccctcgcctgaacgagtgggacagctcctgccccccagcgcgtccccaggctccgggatggtcactgtccaggaggcgcttggccctgctcacccgcccgttctgcccatcccttgagaactccgcgatttcgaaactttcctgatctttctgccggaagtaatttgttctacgtgaaaccacgggccactccttcatatctgtagagcgctctaccttctgtaacgtttatctgcgaaactgctgcgttaggccaggagcactccaagagcgagaggcagacgccgt

SEQ ID NO: 15556 - DNA, 519 bp, Homo sapiens
  source 1..519: mol_type = unassigned DNA
cggcggtcgcacctctcgcagacgcgcacggtccaggctgcgatgatccaggaggagatgctgaagaccagcagcacggtgccggggcagatggtcatgagtgtcttcatgacgaagcgcgtgttgaaggtgatcttgttgagggccccgatgctgcggctcgaggcgtccgtgaagattttgctgtgcagtagcatcacccggcccagcaggtagaggcgcaggaacatggggatggacagcagcacgtccacgtcggcctcggccaccgagggcgcgtacgtgaaggccagccgcgccgtccacgtgaagcggtagtggccgggcaccgggtgaatggcgcacactgccagctctagcgagatgaggaacacgcgctcgcaggtcatggcgatgcgccagtcatcagccccgttgtccaccatgaacagctgtggagggcgggagggaaccagccatgggtgtcagacacgcgccgcgctccctgcccagccccaccgcgcccccagagagtgacgt

SEQ ID NO: 15557 - DNA, 204 bp, Homo sapiens
  source 1..204: mol_type = unassigned DNA
cgcgcagggaggtgcagacgcaggcccgtggggaggcacgtggcagcaggacttacctctggggtgccccgggtcggtgaactcatacttccccacgccaatggtccgcagcatctgcagcccgtgggccgagtcggttgtggggggcccattggtggcaggggcaccactggggagagtggcggacggctgggctggcggcgg

SEQ ID NO: 15558 - DNA, 444 bp, Homo sapiens
  source 1..444: mol_type = unassigned DNA
cgtggccgactgtcatcccacttcgaaacacgcagaggggaaggcagcccgagggctctttctcccaggaagtttctgggcagctgccgccgggcgccaggacaagcgagggtggcctgagtcctgtgctcacatggcgtatgccgcccagtagatgacattgacggccgcaaacgccgcagggaacacagcgcgggcgtaaatgtcaatggtgtctgcgtcgatgggcctgagccgggcacggatgcccccctggcctcctgagcgggctgccccctccttcttcgtctcccctgtctccacccccaccgacctgtaggagcccatcaggttccccgggacgcggcgctgccggcgggagatggccagctcctgcgtgacgccggcagcagagagggagaagaggacaatggcgttcctcacgtccatctgcacgaaggccgg

SEQ ID NO: 15559 - DNA, 397 bp, Homo sapiens
  source 1..397: mol_type = unassigned DNA
cggaagctgagtgcgtcccgagcaggcctaccatctagggtgggggtgggcggacgtgtccccaccgcctgtcgtcggcccccagctggccctggcgaggcaggagctcttggggccatctgctcgggcctatttttgcctcggtcccgcagtgcctgcggagcccggtgggaggagccggtctgagtcactgccaccacccggctccccctgttgagagtggactccgtgcgtgtgtcccccaggaacggtgacaagtacgacggcgactgggtccgggaccggcgtcagggacacggggtgctgcgctgcgccgacggctccacctacaaggtacccgggggcgcgcggcacctgctgcccagagggtacaggcctcgtggtgggcagggcgcgt

SEQ ID NO: 15560 - DNA, 1530 bp, Homo sapiens
  source 1..1530: mol_type = unassigned DNA
cggctgtccccgcctccaaaaccgccctggcgcgcgttcggccgcccccatacccgccgtggcgcgcgttcagccgctccatgtactgagcggtcacgtccacggcctccgcctccggcagctgcaggttccccgaaacgttgcatcgcaggtcgttccagtccgagcgcagcagctcgaagtccacggcgcccacgctgaacgtgcgctgccagtcgatggcgtcctcacgccagcgtccgagcgccgggcccgcggcctcctcgctgtcctccgacgcggcctcgtcgcccggggccccatcgtcctccccttcctcctcctcttcgccctccccgggcagctgcggcccggacacctgggacaagctcaggaaggaggtcacgggccgcgcttcggaggacaagtttgagtccactgtgggcgccgcaggtcccagcgtgcgcgcctggccctcccggcccccttgggtggcctgcgcccgggctgggggcctcggctgtgtggcctgggggccgccggtcctgcggccgtggggccggggtgggcgtgggggcgcccgcagctgcactctgggcagaggcctggggtgcaggaagacgccagggaagggcggccagggcgcacgcggcgctggggcccggggggatgcccgctgtcccggccgcaccctggtcacgtacacctttgggggcggctgctccactgcagggcgcgggggcggagctcggcccaagaagagcggcaaagggcgggcggccctggcggcccagctcagggcccgggagtgcctgggggtccccccgtcccgggggcggggaggggtcggcggggcgagggtggctccgggctgggcgggggctgctggggcgggggactgggggccgctcctgggcggggccgcctcggtgggctccaggctgtcgagcagctccccctcgtcctcgtcgtccaggaagtctgcgggaaacgcgggttagaagctccctgcgcaggtgggtgcgggccaggggcgctgcggacactcaccgtccgggttgaggaagaggaaggctcggcgctgcacctcgtcttcttcatcctcatccccctcctccttgtccatcttcatgtatttatagaacccaaacctggggcgcggcggggcatcagagccgagtcccgccccgcccaccccgccccgcattagcccggccgcgcgcccacctctccagatacagcggagactcgcggtagaagcacttgttgtccgtctccatgtgggtgaggcgagtgtagtcgttgggataaacgaaggacaggtacacctggggggtgggggggcgcagggctcagggcgcggacctcccggggcggcctcccaaggggctggagaaggctccgcggagtcccggacgggagacggggtctccagccgcactcacaaattgcaggccctggtatctggcgatcgggaagtccttgaccacgtaggtgggggcgtaggcgcagggctccagcacgttctccaggctcgaagattccatgcgt

SEQ ID NO: 15561 - DNA, 414 bp, synthetic construct
  misc_feature 1..414: note = Description of Artificial Sequence: Synthetic polynucleotide
  source 1..414: mol_type = other DNA
tygttagtgttygtygttttttataygtggtygtagttttgtgtatggggtygttygttattttgtygtttttgatttgggttgtgggttygtgataygtgtttgagttttttagtygtggtygtgaygttttgtgyggaggtttygttygygtgttgttttygttttttttgttttggayggttatttattatttttgttttttattttgggggttttatgatttyggagtttttaygttttggtatagagtttgttttttygggattgggtttyggtygagtagatatygtttagttgttttttgattagygttttttgttttgygtttggttggtatyggyggtttgttgagtttagtttggtatttygttggtatyggyggttygttgggtttagtttggygttgatayg

SEQ ID NO: 15562 - DNA, 987 bp, synthetic construct
  misc_feature 1..987: note = Description of Artificial Sequence: Synthetic polynucleotide
  source 1..987: mol_type = other DNA
tyggagggttttttygtygataggttttaygttttttatttgtaggataatgaagtggtygttttgtagtttttygtggtgtagttgtaygatagtaatttttattygyggygggagtatttttattttatygygyggttttggygggtagatgatattttggttagtttttttygtttgttygagttttagttttatttyggagtttygtattatagtttttaygtgtatttgyggtyggygygatttataagtttattygtttatagttatygygatttttagtyggtggtgagtgtttttttaaagtgggtttggttttatttagtttttyggttttyggtagtagaagagggtttagtttttgtagagttgttgggggttttaggtttyggttatgggtgggggtttggyggtttagggttatttagggyggtttggttggttttgggatttgttttttggtggttaagtagtggttatgaaagtttagtygttgttatatttttgaggaatyggygtattttygtttatagyggtagttgggggtatttaygtggttyggggttgttttgatttggtagygtatgggggttgttgtttgggttttttagtgtgttatttgygygtttttygtttagygtttttyggtygtgtttgtttatataggtgyggggtyggggtggtgygttyggggtttgggtgtagggggtagygtgggatatagttygtgaygygttttttttttygtagttttatttggttgygtttaatagttttttgttaggyggtatgyggggtattygyggggtygatttttagtgtttttagtaggygygggtygtggggttggygggtatttttygygtttttttgttttygygtttgtaggatttgtatagtatygtgygtygtgtygatygygtagtygtgtttatygttaattttaaggtgggttagtttagttttgagggygygggtttttyg

SEQ ID NO: 15563 - DNA, 1061 bp, synthetic construct
  misc_feature 1..1061: note = Description of Artificial Sequence: Synthetic polynucleotide
  source 1..1061: mol_type = other DNA
tygttgttggtggggttyggggagttttgttgtggtygttatttattaggtaggyggtgaaggtttyggygtyggtatttattagygtggttagtttggtygaagtttygyggaagggygggattaggygtygtatygtygtgtttagggattggaattggygtygttygtaggttatgaggtttattatggagtttagygtygtattttgygagaggggtggatgtgggggtygtagggattttagayggttygggatygattttaggaagagttaggggttygggtgatttttgygggggttttattygtgtggtttttaygtttttatttagggyggttttatygygttttttttatttygtgttttttttttaatagygttttttttttttttygttttttttttaataattgygttttttttgttttttttttygygtttattatggtygtagyggtygtygttatygagtygttttygggggtygtagagygggtatttattttttttaygaaggygygtagggatttgttgtttaggtttygtttaggttygygtttagggattaggtatttgtagggtgggygyggtttagygggtttggtyggggttggtggggggagygtagttttttyggggyggttttaggttttaygttygtttgtatttayggggaggtgattattyggttgagaatttgyggggattyggtyggggtttttgtgttttttttagtttttagatttyggtttggygtaggtygagtaggygtttaaagggaggygttgggaggatttagtygggtttttaygtagggattttagygtttygtaaggttygagaggtagagttygggaggggtgagaagagggygggagggtagaggtttattygatgattygttttttagggttgaaggggtatagggagtttaggtttagtyggtttattatttggaaaaggggtttggagtggaaayggtttyggygygtttttattattaggaaagtttyggaattygygggttttatttttgyggtagtygttttttgtttyg

SEQ ID NO: 15564 - DNA, 382 bp, synthetic construct
  misc_feature 1..382: note = Description of Artificial Sequence: Synthetic polynucleotide
  source 1..382: mol_type = other DNA
gygtgtttattattyggtataygggagatttaygygtgtttattgtygggtataggggagatttaygygtgtttattgttyggtataygagagatttaygygtgtttatygtttggtatagggagatttaygygtgtttattgttyggtataggggagatttaygygtgtttattgttyggtatagggagatttaygygtgtttattgttyggtataggggagatttaygtgtgtttattgttyggtatagggaagatttaygtgtgtttattgttyggtatataggagatttatayggggtttgtttattattyggtatataggaggtttatgtatttttatygttaggtataygggaaatttaygygtgtttatygttyg

SEQ ID NO: 15565 - DNA, 261 bp, synthetic construct
  misc_feature 1..261: note = Description of Artificial Sequence: Synthetic polynucleotide
  source 1..261: mol_type = other DNA
ayggaggatttttygtttttgyggttagttggattaggtggtyggtagygagayggaataagtagattaggttgagggtgaaggygtaggygattagtagtatggataagaggttgtygtttgttattttttttatygtttggtttagtatttatttattygtttgtagtaagtttagtagtattatttyggtygtygtygttattttattttgtyggagatattgaaggtygaggtygttatygatttttttaatygayg

SEQ ID NO: 15566 - DNA, 892 bp, synthetic construct
  misc_feature 1..892: note = Description of Artificial Sequence: Synthetic polynucleotide
  source 1..892: mol_type = other DNA
aygygggtttttttttygaagttygtttaggaggtagatggagygattygattyggaggataggagggtgtttaggggttttggygttatagtttttataggatgattttggagygtttttggatttygagttgttttggttaaggagtygtattttagttttygttygtagtttaygggaaatgaagttgtttggtttgaagatttgttygaagggtttygagygtatagagtttatggtgttyggttttagatttaygagtatagygygggataygtatttgttatttgygtggggygggagggtatgagygaggggagggtygygtttttaggagggyggtgggggaaggaygggggtygtatygttggtttygtggtggtgtaygttgatgygttttagttgtaggtggttgttttygtggtaggtgttagyggagtygatggtatgtttattagagattattttttagaattgyggagaygggaggggttagataggtyggggttgagttayggaggygttttagtygtttttttatttttattygtatttttatttttaggtygttttgtttttggggtttattttygtygtttygttagttattyggttttatygttttyggtagggagtttaggggtygtaatgtaggggtatygttttygtygttgttaatatttttttyggttattyggtaggttygggttgggtttttagagtttyggttgttaattttggygtygatttggttttygtattgttyggtttgygtgagtataagttttttygtggttaaggtaggattagggyggtaggagaagygygagaaggaggagtagaygtatagygatttagttyggttttygttaaygtttaaatagtttygyg

SEQ ID NO: 15567 - DNA, 682 bp, synthetic construct
  misc_feature 1..682: note = Description of Artificial Sequence: Synthetic polynucleotide
  source 1..682: mol_type = other DNA
tygggggtttayggtgtagygggtygttagtygggtttygggttttttgggtagtaagggttttggtaggattttgagggttgggttaaggagggtagttygtttyggggtatttgttaggggttttatayggttgtttttaggttaggggtggtaaagaygttgttgtygtttgttttgggttyggtttttatggttgtgaaggattttygttatttttygtygtttgtttgggttgttyggggatttttttgttgygttagtatagagtttggaatygyggttaaggtaggaagtttttttgtgaaggtattaagtayggtagaygtttttatatygtyggggttygtttttttgtggaygggaagtgggaaygtgaygtggaygtgaygtgggaaygtaaygtgaygtgaygtgaygtgaygtggtatggygygaggatagygyggygggagyggygttttagatttagtagggagggagaygaaaggyggatggaagaggggttttyggatttygtttttygaggtttgtgtgtygttttggttgyggygttttgggygaygggaaatagagttaggatatagattagggagggtyggggtagagttagggtatttgygggygaggayggttgggtgttgggttttyggygttagggygtaatgtygtttgttgggyg

SEQ ID NO: 15568 - DNA, 223 bp, synthetic construct
  misc_feature 1..223: note = Description of Artificial Sequence: Synthetic polynucleotide
  source 1..223: mol_type = other DNA
aygygtttyggtaggatttttattttaygtgatttattttygggtttgttgygtaggatagaagttagtttygggtggggttttygaatatggtggyggggtttgggtgggatagaggyggggygygaggyggagagattttgttttttagaataggtaaagggyggggtygggattagatttgtgtattttttygtttygtatttagygtttttgtttttyg

SEQ ID NO: 15569 - DNA, 255 bp, synthetic construct
  misc_feature 1..255: note = Description of Artificial Sequence: Synthetic polynucleotide
  source 1..255: mol_type = other DNA
gyggatagttygaatgtattgtagaagtattygtttattagtgggttttatygtygggtataggtttgtgtgtttagggtagagygtttggtgtatgttgtggagggygtgggtaatggygtatatygtattaattataaattgtattttgtttttttgttygtaggtggagtttyggtygatgygtttttygtttgttttagggatgtttagagaaagtgtgttyggtttttatgtatygaattyggtttttyg

SEQ ID NO: 15570 - DNA, 309 bp, synthetic construct
  misc_feature 1..309: note = Description of Artificial Sequence: Synthetic polynucleotide
  source 1..309: mol_type = other DNA
tygttygtgtattttggagatatagtagaygtattgttggaaggygtatagtattattttttttagtatygttatggttttttygttggtygttagygtgtaggagaatagygattttttygagtttgtygggagatagttaygttaatggttataaygggtatagygtttaggaaygtagtaatttagttagtygttagttttttttttggygygggtattatttaaygygtttatttggggtttagatgygataaattggtygagggattttgggttttggttgggaygagygtagtaaatttgtyg

SEQ ID NO: 15571 - DNA, 992 bp, synthetic construct
  misc_feature 1..992: note = Description of Artificial Sequence: Synthetic polynucleotide
  source 1..992: mol_type = other DNA
tygttttgygtttagtagtatagtatygtgggggttagatagaggygttttygttttttagtyggggttagtttygggttttttttttttttagatyggtataggatttagatygtttattttagtatattgatttagatagtttygyggattagtttggttattttgagtaggagttgttygaatgtgttyggttggaagtgggtggtygagtgttggatgtagaggtataggaggaaggygggggttagtttgtggtygtygtttttyggttygattaaygttatgattttttgtagtagygtgttttttaggtggggtttaaattttaggagtagttgttggygtyggggtagggyggtttgagtaggggaggyggtttttygggtttygagygyggtttygtatagtyggtagttttgyggtatagttyggaggygygttaaggttygggygggtaggggttgggtttgygyggggtttttgaatagtagtaggtagtagagttttagggagagtaggttttygtggtgtagtattayggttttgtgttttatttyggagaagttgayggagatgtgygtttyggggatgggttttaggattagttttttygyggtttggtygttgttygggagyggttgtyggyggatggtgtagtgtagaggtaggatgtygggggttgagaggttgatgttgggtttgttggagggggttygttggtttatygtgtgtyggtttyggttgagtatatatattaggttgttttgaaatagagatttygtttagggtaggygtaaygygagtagtataygggaaaagygtttygtgtttagttattggttgttgaagtagygtggttgggatgttgtygttaygggttttttatgtttttggttatttttatattagaatttygayggtttttaggaattygtttttygatgttygggtttattttagaggaggtyggtttttyggaggagtatayg

SEQ ID NO: 15572 - DNA, 265 bp, synthetic construct
  misc_feature 1..265: note = Description of Artificial Sequence: Synthetic polynucleotide
  source 1..265: mol_type = other DNA
tygygttttgygtttttggttttttttttttttagtgttttttttatttggygtygttyggtygtaattttggtttttttggggaagaggttyggattttattttttatttgatatgaagaggttyggatttttagttttattyggtatgtttaygggtagtagttttattttgtttggygtgtttaygggtagtagttttgttttattyggygtgtttayggttagtagtttygttgtgtttggygtgtttaygggtagtttyg

SEQ ID NO: 15573 - DNA, 488 bp, synthetic construct
  misc_feature 1..488: note = Description of Artificial Sequence: Synthetic polynucleotide
  source 1..488: mol_type = other DNA
tyggyggaggygggygtggtgggggaggggtttttttttttgtttttttatttttttggtaggygttttagggygggggtgttgtygygygtttyggygygttttggttttgttattagttttattggggttttataatygtttagtygtttagtgygygtttggagaaagagaagtgggygattayggagtagygtttttattattgatygttttttygttattgtatttatataatttgttttaaatgggtaatttattaagtatattttgtttttgttttygtygtaggtttttgtyggatygtygtttataagtttttatagttygtgagtttttttagtttggttyggtttattttgtggygtttaygtttatttygggtttttttygatttttttttaatttttagtagagtygygggttttttttagttagtttttatagygygtttaggagatygtgttttttttygttagataygggyg

SEQ ID NO: 15574 - DNA, 676 bp, synthetic construct
  misc_feature 1..676: note = Description of Artificial Sequence: Synthetic polynucleotide
  source 1..676: mol_type = other DNA
tygttatttggatatgayggattgtttygtgttggaggaygaaggtttgtatattatygyggygtattgtaygtagtttatttatttttatttgygtygttgygttygtttgatygaygaaggtttgygttatttggtgatttattgygtttttattaaggagttgagygttagygattgtygtttygttagygatttyggtttgygggagatygttaagttggagtttygtttgyggtatttgagtatygygtattgyggtygggttatygaygtgggtattygttaygtggttaagtattgtagtaagttgygttattttaaygygaggggttgygagggtattayggattayggtgtggagtatttygttaagaattgtattaaatttaaatttttggatatyggtaaatgttttttggtattygataygggtttggagtgtttggttttgaattgttttaattttaagyggtttagttttaagttttgygagagtattatyggttagggtttgtagatygtggtygttaattgttttgatttttagaygttgaatgtttaggattgygaggttttygtggaggttttgygttttgttaaaygttattgtaagygttgygttatygagtatattaattyggtttttttttgaagggatagagtttattyggyg

SEQ ID NO: 15575 - DNA, 1238 bp, synthetic construct
  misc_feature 1..1238: note = Description of Artificial Sequence: Synthetic polynucleotide
  source 1..1238: mol_type = other DNA
gyggtttaaaggtatyggaygttggggttaagatgattttygygttgttatgaattaggttattggaygygggtttygygtygagtttgtagttttygaggagtttttygggttttttygttttgattatattttttyggatggttgtygggtttttgtttgtttygttttgtatygagttttttatgatttttttygtttttagtttgtttttttygttttttyggaagtagtygagggtyggttyggggttttttaatttgattattttggaggttttaggatyggtttygayggtttttygaggttttattgattgatttaggttgggttttagtttttgttttttggttttgatatgtagygttaggggttgtatygggtgtaattygggtttggaggtggygtygtttgaygttgtyggyggttgtaggagtygtaggtygggtttgaattgtaatagtygygtttgygyggaygaggtagyggttttttygttttgggtttgaggttgtggtagtagtaatatttgttttggttttatttgtagtagtygtygtatygygggttgtaagtyggaygttattgttttttygtaygaygaggttaaggtygtattggttgtygygtttagtgtgggagaygayggagggggttttatggttgttgtttaaaaggaggtgttttygatyggtagygggggyggagygggaygtaaygggygyggttgaggyggyggttygggtttggttttttttatgggggagggggaygtttyggttaggattgtgagtttagtygtttgttggygattttttttttttttttttyggttaagagttttgtaaggtttttgttatttagaattttaygyggtttaaaaygtagttgtttgtttgggttttatttaattataaygatygatattygtggayggttaattataggygggtttttyggttttttttggtttttattttygtttygtgttgagttttygaattatttgttatggtaggagtygtygtatttgttgtatattttygttttgatttttttgtggagtttttttatagtygttgtttttagttattttttttttattyggagttgygataatggygttgtttaggaaaygttgygtttttaggtygttgatatttagggaatgaagttttgygttataaggggagygayggttttgtgtaygygttttgtgyggtttgagtaatttgtyg

SEQ ID NO: 15576 - DNA, 220 bp, synthetic construct
  misc_feature 1..220: note = Description of Artificial Sequence: Synthetic polynucleotide
  source 1..220: mol_type = other DNA
aygtttatygtttygtaggtagttttagttygagtggtggtygtgttgggtttgtgttyggggttttttttygtatgttttygttttttagtgtttgygatgaygtgygatttattaattattyggatttagygtatttttatgttaaatagygygtgtttatttgtaaagtataygatagtttttgyggttattgggtgtyggygtttagtttgtttyg

SEQ ID NO: 15577 - DNA, 631 bp, synthetic construct
  misc_feature 1..631: note = Description of Artificial Sequence: Synthetic polynucleotide
  source 1..631: mol_type = other DNA
gyggtgaggggtgatttyggaggaggtagagtttygggtgttygtgggaagttttaaagtygggtygygggayggttattttgggttgtgaygtagtttaggattttygttaaggtatttgttggaggttttttttgggttttaygatttygattgygtttgtyggttgttagygaggaggyggggttaaggygagggyggggtygaggtaggaggggyggggtyggtttgatgggyggggttttygtgtgggyggggttgttggttttgyggtttgagttagyggggagaggttygggyggaggaggttgyggatttttagaggtttagtgtyggaagttgggtttggaaagggggtatygttttttyggttttggtggyggggagtgaggggaygggygaaagyggtatagggaatagtatgataygggtttgaggtagggtatatttggaaaggggygaggagagggtagtggtttttggtayggtagtagtgggtatatagaggtagtygggattygtttggaagagttttygttyggggtaaggagtygggattgtgtttaggaggtagtggggagtttyggagagygaagygttttttgygtagattygygtgtttggagtatyg

SEQ ID NO: 15578 - DNA, 904 bp, synthetic construct
  misc_feature 1..904: note = Description of Artificial Sequence: Synthetic polynucleotide
  source 1..904: mol_type = other DNA
ayggygtttgtttttygtttttggagtgtttttggtttaaygtagtagtttygtagataaaygttatagaaggtagagygttttatagatatgaaggagtggttygtggttttaygtagaataaattattttyggtagaaagattaggaaagtttygaaatygyggagtttttaagggatgggtagaaygggygggtgagtagggttaagygttttttggatagtgattatttyggagtttggggaygygttggggggtaggagttgttttattygtttaggygagggtttgggaagggattttaagygggaggtygaygttgtttgggtttttttttggggyggtygtttttttatttatttygagtatttygaaatttggaaaggagtaaagttgaagygatggttaygtgtatgayggtaggtagtttgtagattygttgttaaattatatttaygtygggtttaataggygygtatttgtyggtaygtygttygttgttgtgatttgggtagygtygggttttaggttttygtttttygygttgtgatagtgagaagtygagaaagttatgttaygttygtttgaggaggtagttttttagtgtggtagaaagaaatgtttatttttygagtattagttaggaygtgtgtttaagttaatttgtttatttttttatttgattttttatgtaatgtaatatgtatgttttatttataaaaatgagtagygaaatttatygatttagtaatatgtttygagataygtaggagttttttttayggagttagttttyggtttttttttttaatatttatttygygttygygtagttygggtttttgttattgygttgttagttgggyggtattttttaggyggggaaaagygaattttttgtyg

SEQ ID NO: 15579 - DNA, 519 bp, synthetic construct
  misc_feature 1..519: note = Description of Artificial Sequence: Synthetic polynucleotide
  source 1..519: mol_type = other DNA
aygttattttttgggggygyggtggggttgggtagggagygyggygygtgtttgatatttatggttggttttttttygttttttatagttgtttatggtggataayggggttgatgattggygtatygttatgatttgygagygygtgttttttatttygttagagttggtagtgtgygttatttattyggtgttyggttattatygttttaygtggayggygyggttggtttttaygtaygygttttyggtggtygaggtygaygtggaygtgttgttgtttatttttatgtttttgygtttttatttgttgggtygggtgatgttattgtatagtaaaatttttayggaygtttygagtygtagtatyggggtttttaataagattatttttaataygygtttygttatgaagatatttatgattatttgtttyggtatygtgttgttggtttttagtatttttttttggattatygtagtttggatygtgygygtttgygagaggtgygatygtyg

SEQ ID NO: 15580 - DNA, 204 bp, synthetic construct
  misc_feature 1..204: note = Description of Artificial Sequence: Synthetic polynucleotide
  source 1..204: mol_type = other DNA
tygtygttagtttagtygttygttattttttttagtggtgtttttgttattaatgggttttttataatygattyggtttaygggttgtagatgttgyggattattggygtggggaagtatgagtttatygattyggggtattttagaggtaagttttgttgttaygtgtttttttaygggtttgygtttgtatttttttgygyg

SEQ ID NO: 15581 - DNA, 444 bp, synthetic construct
  misc_feature 1..444: note = Description of Artificial Sequence: Synthetic polynucleotide
  source 1..444: mol_type = other DNA
tyggttttygtgtagatggaygtgaggaaygttattgtttttttttttttttttgttgtyggygttaygtaggagttggttatttttygtyggtagygtygygtttyggggaatttgatgggtttttataggtyggtgggggtggagataggggagaygaagaaggagggggtagttygtttaggaggttaggggggtattygtgttyggtttaggtttatygaygtagatattattgatatttaygttygygttgtgttttttgyggygtttgyggtygttaatgttatttattgggyggtataygttatgtgagtataggatttaggttattttygtttgttttggygttyggyggtagttgtttagaaattttttgggagaaagagttttygggttgtttttttttttgygtgtttygaagtgggatgatagtyggttayg

SEQ ID NO: 15582 - DNA, 397 bp, synthetic construct
  misc_feature 1..397: note = Description of Artificial Sequence: Synthetic polynucleotide
  source 1..397: mol_type = other DNA
aygygttttgtttattaygaggtttgtattttttgggtagtaggtgtygygygttttygggtattttgtaggtggagtygtyggygtagygtagtatttygtgtttttgaygtyggtttyggatttagtygtygtygtatttgttatygtttttgggggatataygtayggagtttatttttaatagggggagtygggtggtggtagtgatttagatyggttttttttatygggtttygtaggtattgygggatygaggtaaaaataggttygagtagatggttttaagagtttttgtttygttagggttagttgggggtygaygataggyggtggggataygttygtttatttttattttagatggtaggtttgttygggaygtatttagttttyg

SEQ ID NO: 15583 - DNA, 1530 bp, synthetic construct
  misc_feature 1..1530: note = Description of Artificial Sequence: Synthetic polynucleotide
  source 1..1530: mol_type = other DNA
aygtatggaattttygagtttggagaaygtgttggagttttgygtttaygtttttatttaygtggttaaggatttttygatygttagatattagggtttgtaatttgtgagtgyggttggagatttygtttttygttygggatttygyggagttttttttagttttttgggaggtygtttygggaggttygygttttgagttttgygtttttttattttttaggtgtatttgtttttygtttattttaaygattatattygttttatttatatggagayggataataagtgtttttatygygagttttygttgtatttggagaggtgggygygyggtygggttaatgyggggyggggtgggyggggygggattyggttttgatgtttygtygygttttaggtttgggttttataaatatatgaagatggataaggaggagggggatgaggatgaagaagaygaggtgtagygtygagttttttttttttttaattyggayggtgagtgttygtagygtttttggttygtatttatttgygtagggagtttttaattygygtttttygtagattttttggaygaygaggaygagggggagttgttygatagtttggagtttatygaggyggtttygtttaggagyggtttttagtttttygttttagtagttttygtttagttyggagttattttygtttygtygattttttttygttttygggayggggggatttttaggtattttygggttttgagttgggtygttagggtygttygttttttgtygttttttttgggtygagtttygttttygygttttgtagtggagtagtygtttttaaaggtgtaygtgattagggtgyggtygggatagygggtattttttygggttttagygtygygtgygttttggtygtttttttttggygtttttttgtattttaggtttttgtttagagtgtagttgygggygtttttaygtttatttyggttttayggtygtaggatyggyggtttttaggttatatagtygaggtttttagttygggygtaggttatttaagggggtygggagggttaggygygtaygttgggatttgyggygtttatagtggatttaaatttgtttttygaagygyggttygtgattttttttttgagtttgttttaggtgttygggtygtagttgtttggggagggygaagaggaggaggaaggggaggaygatggggtttygggygaygaggtygygtyggaggatagygaggaggtygygggttyggygttyggaygttggygtgaggaygttatygattggtagygtaygtttagygtgggygtygtggatttygagttgttgygttyggattggaaygatttgygatgtaaygtttyggggaatttgtagttgtyggaggyggaggtygtggaygtgatygtttagtatatggagyggttgaaygygygttayggygggtatgggggyggtygaaygygygttagggyggttttggaggyggggatagtyg

SEQ ID NO: 15584 - DNA, 414 bp, synthetic construct
  misc_feature 1..414: note = Description of Artificial Sequence: Synthetic polynucleotide
  source 1..414: mol_type = other DNA
ttgttagtgtttgttgttttttatatgtggttgtagttttgtgtatggggttgtttgttattttgttgtttttgatttgggttgtgggtttgtgatatgtgtttgagttttttagttgtggttgtgatgttttgtgtggaggttttgtttgtgtgttgtttttgttttttttgttttggatggttatttattatttttgttttttattttgggggttttatgattttggagtttttatgttttggtatagagtttgtttttttgggattgggttttggttgagtagatattgtttagttgttttttgattagtgttttttgttttgtgtttggttggtattggtggtttgttgagtttagtttggtattttgttggtattggtggtttgttgggtttagtttggtgttgatatg

SEQ ID NO: 15585 - DNA, 987 bp, synthetic construct
  misc_feature 1..987: note = Description of Artificial Sequence: Synthetic polynucleotide
  source 1..987: mol_type = other DNA
ttggagggtttttttgttgataggttttatgttttttatttgtaggataatgaagtggttgttttgtagttttttgtggtgtagttgtatgatagtaatttttatttgtggtgggagtatttttattttattgtgtggttttggtgggtagatgatattttggttagttttttttgtttgtttgagttttagttttattttggagttttgtattatagtttttatgtgtatttgtggttggtgtgatttataagtttatttgtttatagttattgtgatttttagttggtggtgagtgtttttttaaagtgggtttggttttatttagttttttggtttttggtagtagaagagggtttagtttttgtagagttgttgggggttttaggttttggttatgggtgggggtttggtggtttagggttatttagggtggtttggttggttttgggatttgttttttggtggttaagtagtggttatgaaagtttagttgttgttatatttttgaggaattggtgtatttttgtttatagtggtagttgggggtatttatgtggtttggggttgttttgatttggtagtgtatgggggttgttgtttgggttttttagtgtgttatttgtgtgttttttgtttagtgttttttggttgtgtttgtttatataggtgtggggttggggtggtgtgtttggggtttgggtgtagggggtagtgtgggatatagtttgtgatgtgtttttttttttgtagttttatttggttgtgtttaatagttttttgttaggtggtatgtggggtatttgtggggttgatttttagtgtttttagtaggtgtgggttgtggggttggtgggtattttttgtgtttttttgtttttgtgtttgtaggatttgtatagtattgtgtgttgtgttgattgtgtagttgtgtttattgttaattttaaggtgggttagtttagttttgagggtgtgggttttttg

SEQ ID NO: 15586 - DNA, 1061 bp, synthetic construct
  misc_feature 1..1061: note = Description of Artificial Sequence: Synthetic polynucleotide
  source 1..1061: mol_type = other DNA
ttgttgttggtggggtttggggagttttgttgtggttgttatttattaggtaggtggtgaaggttttggtgttggtatttattagtgtggttagtttggttgaagttttgtggaagggtgggattaggtgttgtattgttgtgtttagggattggaattggtgttgtttgtaggttatgaggtttattatggagtttagtgttgtattttgtgagaggggtggatgtgggggttgtagggattttagatggtttgggattgattttaggaagagttaggggtttgggtgatttttgtgggggttttatttgtgtggtttttatgtttttatttagggtggttttattgtgttttttttattttgtgttttttttttaatagtgtttttttttttttttgttttttttttaataattgtgttttttttgtttttttttttgtgtttattatggttgtagtggttgttgttattgagttgtttttgggggttgtagagtgggtatttattttttttatgaaggtgtgtagggatttgttgtttaggttttgtttaggtttgtgtttagggattaggtatttgtagggtgggtgtggtttagtgggtttggttggggttggtggggggagtgtagtttttttggggtggttttaggttttatgtttgtttgtatttatggggaggtgattatttggttgagaatttgtggggatttggttggggtttttgtgttttttttagtttttagattttggtttggtgtaggttgagtaggtgtttaaagggaggtgttgggaggatttagttgggtttttatgtagggattttagtgttttgtaaggtttgagaggtagagtttgggaggggtgagaagagggtgggagggtagaggtttatttgatgatttgttttttagggttgaaggggtatagggagtttaggtttagttggtttattatttggaaaaggggtttggagtggaaatggttttggtgtgtttttattattaggaaagttttggaatttgtgggttttatttttgtggtagttgttttttgttttg

SEQ ID NO: 15587 - DNA, 382 bp, synthetic construct
  misc_feature 1..382: note = Description of Artificial Sequence: Synthetic polynucleotide
  source 1..382: mol_type = other DNA
gtgtgtttattatttggtatatgggagatttatgtgtgtttattgttgggtataggggagatttatgtgtgtttattgtttggtatatgagagatttatgtgtgtttattgtttggtatagggagatttatgtgtgtttattgtttggtataggggagatttatgtgtgtttattgtttggtatagggagatttatgtgtgtttattgtttggtataggggagatttatgtgtgtttattgtttggtatagggaagatttatgtgtgtttattgtttggtatataggagatttatatggggtttgtttattatttggtatataggaggtttatgtatttttattgttaggtatatgggaaatttatgtgtgtttattgtttg

SEQ ID NO: 15588 - DNA, 261 bp, synthetic construct
  misc_feature 1..261: note = Description of Artificial Sequence: Synthetic polynucleotide
  source 1..261: mol_type = other DNA
atggaggattttttgtttttgtggttagttggattaggtggttggtagtgagatggaataagtagattaggttgagggtgaaggtgtaggtgattagtagtatggataagaggttgttgtttgttattttttttattgtttggtttagtatttatttatttgtttgtagtaagtttagtagtattattttggttgttgttgttattttattttgttggagatattgaaggttgaggttgttattgatttttttaattgatg

SEQ ID NO: 15589 - DNA, 892 bp, synthetic construct
  misc_feature 1..892: note = Description of Artificial Sequence: Synthetic polynucleotide
  source 1..892: mol_type = other DNA
atgtgggttttttttttgaagtttgtttaggaggtagatggagtgatttgatttggaggataggagggtgtttaggggttttggtgttatagtttttataggatgattttggagtgtttttggattttgagttgttttggttaaggagttgtattttagtttttgtttgtagtttatgggaaatgaagttgtttggtttgaagatttgtttgaagggttttgagtgtatagagtttatggtgtttggttttagatttatgagtatagtgtgggatatgtatttgttatttgtgtggggtgggagggtatgagtgaggggagggttgtgtttttaggagggtggtgggggaaggatgggggttgtattgttggttttgtggtggtgtatgttgatgtgttttagttgtaggtggttgtttttgtggtaggtgttagtggagttgatggtatgtttattagagattattttttagaattgtggagatgggaggggttagataggttggggttgagttatggaggtgttttagttgtttttttatttttatttgtatttttatttttaggttgttttgtttttggggtttatttttgttgttttgttagttatttggttttattgtttttggtagggagtttaggggttgtaatgtaggggtattgtttttgttgttgttaatattttttttggttatttggtaggtttgggttgggtttttagagttttggttgttaattttggtgttgatttggtttttgtattgtttggtttgtgtgagtataagtttttttgtggttaaggtaggattagggtggtaggagaagtgtgagaaggaggagtagatgtatagtgatttagtttggtttttgttaatgtttaaatagttttgtg

SEQ ID NO: 15590 - DNA, 682 bp, synthetic construct
  misc_feature 1..682: note = Description of Artificial Sequence: Synthetic polynucleotide
  source 1..682: mol_type = other DNA
ttgggggtttatggtgtagtgggttgttagttgggttttgggttttttgggtagtaagggttttggtaggattttgagggttgggttaaggagggtagtttgttttggggtatttgttaggggttttatatggttgtttttaggttaggggtggtaaagatgttgttgttgtttgttttgggtttggtttttatggttgtgaaggatttttgttattttttgttgtttgtttgggttgtttggggatttttttgttgtgttagtatagagtttggaattgtggttaaggtaggaagtttttttgtgaaggtattaagtatggtagatgtttttatattgttggggtttgtttttttgtggatgggaagtgggaatgtgatgtggatgtgatgtgggaatgtaatgtgatgtgatgtgatgtgatgtggtatggtgtgaggatagtgtggtgggagtggtgttttagatttagtagggagggagatgaaaggtggatggaagaggggtttttggattttgttttttgaggtttgtgtgttgttttggttgtggtgttttgggtgatgggaaatagagttaggatatagattagggagggttggggtagagttagggtatttgtgggtgaggatggttgggtgttgggtttttggtgttagggtgtaatgttgtttgttgggtg

SEQ ID NO: 15591 - DNA, 223 bp, synthetic construct
  misc_feature 1..223: note = Description of Artificial Sequence: Synthetic polynucleotide
  source 1..223: mol_type = other DNA
atgtgttttggtaggatttttattttatgtgatttatttttgggtttgttgtgtaggatagaagttagttttgggtggggtttttgaatatggtggtggggtttgggtgggatagaggtggggtgtgaggtggagagattttgttttttagaataggtaaagggtggggttgggattagatttgtgtatttttttgttttgtatttagtgtttttgttttttg

SEQ ID NO: 15592 - DNA, 255 bp, synthetic construct
  misc_feature 1..255: note = Description of Artificial Sequence: Synthetic polynucleotide
  source 1..255: mol_type = other DNA
gtggatagtttgaatgtattgtagaagtatttgtttattagtgggttttattgttgggtataggtttgtgtgtttagggtagagtgtttggtgtatgttgtggagggtgtgggtaatggtgtatattgtattaattataaattgtattttgtttttttgtttgtaggtggagttttggttgatgtgttttttgtttgttttagggatgtttagagaaagtgtgtttggtttttatgtattgaatttggttttttg

SEQ ID NO: 15593 - DNA, 309 bp, synthetic construct
  misc_feature 1..309: note = Description of Artificial Sequence: Synthetic polynucleotide
  source 1..309: mol_type = other DNA
ttgtttgtgtattttggagatatagtagatgtattgttggaaggtgtatagtattattttttttagtattgttatggtttttttgttggttgttagtgtgtaggagaatagtgatttttttgagtttgttgggagatagttatgttaatggttataatgggtatagtgtttaggaatgtagtaatttagttagttgttagttttttttttggtgtgggtattatttaatgtgtttatttggggtttagatgtgataaattggttgagggattttgggttttggttgggatgagtgtagtaaatttgttg

SEQ ID NO: 15594 - DNA, 992 bp, synthetic construct
  misc_feature 1..992: note = Description of Artificial Sequence: Synthetic polynucleotide
  source 1..992: mol_type = other DNA
ttgttttgtgtttagtagtatagtattgtgggggttagatagaggtgtttttgttttttagttggggttagttttgggttttttttttttttagattggtataggatttagattgtttattttagtatattgatttagatagttttgtggattagtttggttattttgagtaggagttgtttgaatgtgtttggttggaagtgggtggttgagtgttggatgtagaggtataggaggaaggtgggggttagtttgtggttgttgttttttggtttgattaatgttatgattttttgtagtagtgtgttttttaggtggggtttaaattttaggagtagttgttggtgttggggtagggtggtttgagtaggggaggtggttttttgggttttgagtgtggttttgtatagttggtagttttgtggtatagtttggaggtgtgttaaggtttgggtgggtaggggttgggtttgtgtggggtttttgaatagtagtaggtagtagagttttagggagagtaggtttttgtggtgtagtattatggttttgtgttttattttggagaagttgatggagatgtgtgttttggggatgggttttaggattagtttttttgtggtttggttgttgtttgggagtggttgttggtggatggtgtagtgtagaggtaggatgttgggggttgagaggttgatgttgggtttgttggagggggtttgttggtttattgtgtgttggttttggttgagtatatatattaggttgttttgaaatagagattttgtttagggtaggtgtaatgtgagtagtatatgggaaaagtgttttgtgtttagttattggttgttgaagtagtgtggttgggatgttgttgttatgggttttttatgtttttggttatttttatattagaattttgatggtttttaggaatttgttttttgatgtttgggtttattttagaggaggttggttttttggaggagtatatg

SEQ ID NO: 15595 - DNA, 265 bp, synthetic construct
  misc_feature 1..265: note = Description of Artificial Sequence: Synthetic polynucleotide
  source 1..265: mol_type = other DNA
ttgtgttttgtgtttttggttttttttttttttagtgttttttttatttggtgttgtttggttgtaattttggtttttttggggaagaggtttggattttattttttatttgatatgaagaggtttggatttttagttttatttggtatgtttatgggtagtagttttattttgtttggtgtgtttatgggtagtagttttgttttatttggtgtgtttatggttagtagttttgttgtgtttggtgtgtttatgggtagttttg

SEQ ID NO: 15596 - DNA, 488 bp, synthetic construct
  misc_feature 1..488: note = Description of Artificial Sequence: Synthetic polynucleotide
  source 1..488: mol_type = other DNA
ttggtggaggtgggtgtggtgggggaggggtttttttttttgtttttttatttttttggtaggtgttttagggtgggggtgttgttgtgtgttttggtgtgttttggttttgttattagttttattggggttttataattgtttagttgtttagtgtgtgtttggagaaagagaagtgggtgattatggagtagtgtttttattattgattgtttttttgttattgtatttatataatttgttttaaatgggtaatttattaagtatattttgtttttgtttttgttgtaggtttttgttggattgttgtttataagtttttatagtttgtgagtttttttagtttggtttggtttattttgtggtgtttatgtttattttgggttttttttgatttttttttaatttttagtagagttgtgggttttttttagttagtttttatagtgtgtttaggagattgtgtttttttttgttagatatgggtg

SEQ ID NO: 15597 - DNA, 676 bp, synthetic construct
  misc_feature 1..676: note = Description of Artificial Sequence: Synthetic polynucleotide
  source 1..676: mol_type = other DNA
ttgttatttggatatgatggattgttttgtgttggaggatgaaggtttgtatattattgtggtgtattgtatgtagtttatttatttttatttgtgttgttgtgtttgtttgattgatgaaggtttgtgttatttggtgatttattgtgtttttattaaggagttgagtgttagtgattgttgttttgttagtgattttggtttgtgggagattgttaagttggagttttgtttgtggtatttgagtattgtgtattgtggttgggttattgatgtgggtatttgttatgtggttaagtattgtagtaagttgtgttattttaatgtgaggggttgtgagggtattatggattatggtgtggagtattttgttaagaattgtattaaatttaaatttttggatattggtaaatgttttttggtatttgatatgggtttggagtgtttggttttgaattgttttaattttaagtggtttagttttaagttttgtgagagtattattggttagggtttgtagattgtggttgttaattgttttgatttttagatgttgaatgtttaggattgtgaggtttttgtggaggttttgtgttttgttaaatgttattgtaagtgttgtgttattgagtatattaatttggtttttttttgaagggatagagtttatttggtg

SEQ ID NO: 15598 - DNA, 1238 bp, synthetic construct
  misc_feature 1..1238: note = Description of Artificial Sequence: Synthetic polynucleotide
  source 1..1238: mol_type = other DNA
gtggtttaaaggtattggatgttggggttaagatgatttttgtgttgttatgaattaggttattggatgtgggttttgtgttgagtttgtagtttttgaggagttttttgggtttttttgttttgattatatttttttggatggttgttgggtttttgtttgttttgttttgtattgagttttttatgattttttttgtttttagtttgttttttttgtttttttggaagtagttgagggttggtttggggttttttaatttgattattttggaggttttaggattggttttgatggttttttgaggttttattgattgatttaggttgggttttagtttttgttttttggttttgatatgtagtgttaggggttgtattgggtgtaatttgggtttggaggtggtgttgtttgatgttgttggtggttgtaggagttgtaggttgggtttgaattgtaatagttgtgtttgtgtggatgaggtagtggtttttttgttttgggtttgaggttgtggtagtagtaatatttgttttggttttatttgtagtagttgttgtattgtgggttgtaagttggatgttattgtttttttgtatgatgaggttaaggttgtattggttgttgtgtttagtgtgggagatgatggagggggttttatggttgttgtttaaaaggaggtgtttttgattggtagtgggggtggagtgggatgtaatgggtgtggttgaggtggtggtttgggtttggttttttttatgggggagggggatgttttggttaggattgtgagtttagttgtttgttggtgatttttttttttttttttttggttaagagttttgtaaggtttttgttatttagaattttatgtggtttaaaatgtagttgtttgtttgggttttatttaattataatgattgatatttgtggatggttaattataggtgggttttttggttttttttggtttttatttttgttttgtgttgagtttttgaattatttgttatggtaggagttgttgtatttgttgtatatttttgttttgatttttttgtggagtttttttatagttgttgtttttagttattttttttttatttggagttgtgataatggtgttgtttaggaaatgttgtgtttttaggttgttgatatttagggaatgaagttttgtgttataaggggagtgatggttttgtgtatgtgttttgtgtggtttgagtaatttgttg

SEQ ID NO: 15599 - DNA, 220 bp, synthetic construct
  misc_feature 1..220: note = Description of Artificial Sequence: Synthetic polynucleotide
  source 1..220: mol_type = other DNA
atgtttattgttttgtaggtagttttagtttgagtggtggttgtgttgggtttgtgtttggggtttttttttgtatgtttttgttttttagtgtttgtgatgatgtgtgatttattaattatttggatttagtgtatttttatgttaaatagtgtgtgtttatttgtaaagtatatgatagtttttgtggttattgggtgttggtgtttagtttgttttg

SEQ ID NO: 15600 - DNA, 631 bp, synthetic construct
  misc_feature 1..631: note = Description of Artificial Sequence: Synthetic polynucleotide
  source 1..631: mol_type = other DNA
gtggtgaggggtgattttggaggaggtagagttttgggtgtttgtgggaagttttaaagttgggttgtgggatggttattttgggttgtgatgtagtttaggatttttgttaaggtatttgttggaggttttttttgggttttatgattttgattgtgtttgttggttgttagtgaggaggtggggttaaggtgagggtggggttgaggtaggaggggtggggttggtttgatgggtggggtttttgtgtgggtggggttgttggttttgtggtttgagttagtggggagaggtttgggtggaggaggttgtggatttttagaggtttagtgttggaagttgggtttggaaagggggtattgtttttttggttttggtggtggggagtgaggggatgggtgaaagtggtatagggaatagtatgatatgggtttgaggtagggtatatttggaaaggggtgaggagagggtagtggtttttggtatggtagtagtgggtatatagaggtagttgggatttgtttggaagagtttttgtttggggtaaggagttgggattgtgtttaggaggtagtggggagttttggagagtgaagtgttttttgtgtagatttgtgtgtttggagtattg

SEQ ID NO: 15601 - DNA, 904 bp, synthetic construct
  misc_feature 1..904: note = Description of Artificial Sequence: Synthetic polynucleotide
  source 1..904: mol_type = other DNA
atggtgtttgttttttgtttttggagtgtttttggtttaatgtagtagttttgtagataaatgttatagaaggtagagtgttttatagatatgaaggagtggtttgtggttttatgtagaataaattatttttggtagaaagattaggaaagttttgaaattgtggagtttttaagggatgggtagaatgggtgggtgagtagggttaagtgttttttggatagtgattattttggagtttggggatgtgttggggggtaggagttgttttatttgtttaggtgagggtttgggaagggattttaagtgggaggttgatgttgtttgggtttttttttggggtggttgtttttttatttattttgagtattttgaaatttggaaaggagtaaagttgaagtgatggttatgtgtatgatggtaggtagtttgtagatttgttgttaaattatatttatgttgggtttaataggtgtgtatttgttggtatgttgtttgttgttgtgatttgggtagtgttgggttttaggtttttgttttttgtgttgtgatagtgagaagttgagaaagttatgttatgtttgtttgaggaggtagttttttagtgtggtagaaagaaatgtttattttttgagtattagttaggatgtgtgtttaagttaatttgtttatttttttatttgattttttatgtaatgtaatatgtatgttttatttataaaaatgagtagtgaaatttattgatttagtaatatgttttgagatatgtaggagttttttttatggagttagtttttggtttttttttttaatatttattttgtgtttgtgtagtttgggtttttgttattgtgttgttagttgggtggtattttttaggtggggaaaagtgaattttttgttg

SEQ ID NO: 15602 - DNA, 519 bp, synthetic construct
  misc_feature 1..519: note = Description of Artificial Sequence: Synthetic polynucleotide
  source 1..519: mol_type = other DNA
atgttattttttgggggtgtggtggggttgggtagggagtgtggtgtgtgtttgatatttatggttggtttttttttgttttttatagttgtttatggtggataatggggttgatgattggtgtattgttatgatttgtgagtgtgtgttttttattttgttagagttggtagtgtgtgttatttatttggtgtttggttattattgttttatgtggatggtgtggttggtttttatgtatgtgtttttggtggttgaggttgatgtggatgtgttgttgtttatttttatgtttttgtgtttttatttgttgggttgggtgatgttattgtatagtaaaatttttatggatgttttgagttgtagtattggggtttttaataagattatttttaatatgtgttttgttatgaagatatttatgattatttgttttggtattgtgttgttggtttttagtatttttttttggattattgtagtttggattgtgtgtgtttgtgagaggtgtgattgttg

SEQ ID NO: 15603 - DNA, 204 bp, synthetic construct
  misc_feature 1..204: note = Description of Artificial Sequence: Synthetic polynucleotide
  source 1..204: mol_type = other DNA
ttgttgttagtttagttgtttgttattttttttagtggtgtttttgttattaatgggttttttataattgatttggtttatgggttgtagatgttgtggattattggtgtggggaagtatgagtttattgatttggggtattttagaggtaagttttgttgttatgtgtttttttatgggtttgtgtttgtatttttttgtgtg

SEQ ID NO: 15604 - DNA, 444 bp, synthetic construct
  misc_feature 1..444: note = Description of Artificial Sequence: Synthetic polynucleotide
  source 1..444: mol_type = other DNA
ttggtttttgtgtagatggatgtgaggaatgttattgtttttttttttttttttgttgttggtgttatgtaggagttggttattttttgttggtagtgttgtgttttggggaatttgatgggtttttataggttggtgggggtggagataggggagatgaagaaggagggggtagtttgtttaggaggttaggggggtatttgtgtttggtttaggtttattgatgtagatattattgatatttatgtttgtgttgtgttttttgtggtgtttgtggttgttaatgttatttattgggtggtatatgttatgtgagtataggatttaggttatttttgtttgttttggtgtttggtggtagttgtttagaaattttttgggagaaagagtttttgggttgtttttttttttgtgtgttttgaagtgggatgatagttggttatg

SEQ ID NO: 15605 - DNA, 397 bp, synthetic construct
  misc_feature 1..397: note = Description of Artificial Sequence: Synthetic polynucleotide
  source 1..397: mol_type = other DNA
atgtgttttgtttattatgaggtttgtattttttgggtagtaggtgttgtgtgtttttgggtattttgtaggtggagttgttggtgtagtgtagtattttgtgtttttgatgttggttttggatttagttgttgttgtatttgttattgtttttgggggatatatgtatggagtttatttttaatagggggagttgggtggtggtagtgatttagattggttttttttattgggttttgtaggtattgtgggattgaggtaaaaataggtttgagtagatggttttaagagtttttgttttgttagggttagttgggggttgatgataggtggtggggatatgtttgtttatttttattttagatggtaggtttgtttgggatgtatttagtttttg

SEQ ID NO: 15606 - DNA, 1530 bp, synthetic construct
  misc_feature 1..1530: note = Description of Artificial Sequence: Synthetic polynucleotide
  source 1..1530: mol_type = other DNA
atgtatggaatttttgagtttggagaatgtgttggagttttgtgtttatgtttttatttatgtggttaaggattttttgattgttagatattagggtttgtaatttgtgagtgtggttggagattttgttttttgtttgggattttgtggagttttttttagttttttgggaggttgttttgggaggtttgtgttttgagttttgtgtttttttattttttaggtgtatttgttttttgtttattttaatgattatatttgttttatttatatggagatggataataagtgtttttattgtgagtttttgttgtatttggagaggtgggtgtgtggttgggttaatgtggggtggggtgggtggggtgggatttggttttgatgttttgttgtgttttaggtttgggttttataaatatatgaagatggataaggaggagggggatgaggatgaagaagatgaggtgtagtgttgagttttttttttttttaatttggatggtgagtgtttgtagtgtttttggtttgtatttatttgtgtagggagtttttaatttgtgttttttgtagattttttggatgatgaggatgagggggagttgtttgatagtttggagtttattgaggtggttttgtttaggagtggtttttagttttttgttttagtagtttttgtttagtttggagttatttttgttttgttgatttttttttgtttttgggatggggggatttttaggtatttttgggttttgagttgggttgttagggttgtttgttttttgttgttttttttgggttgagttttgtttttgtgttttgtagtggagtagttgtttttaaaggtgtatgtgattagggtgtggttgggatagtgggtatttttttgggttttagtgttgtgtgtgttttggttgtttttttttggtgtttttttgtattttaggtttttgtttagagtgtagttgtgggtgtttttatgtttattttggttttatggttgtaggattggtggtttttaggttatatagttgaggtttttagtttgggtgtaggttatttaagggggttgggagggttaggtgtgtatgttgggatttgtggtgtttatagtggatttaaatttgttttttgaagtgtggtttgtgattttttttttgagtttgttttaggtgtttgggttgtagttgtttggggagggtgaagaggaggaggaaggggaggatgatggggttttgggtgatgaggttgtgttggaggatagtgaggaggttgtgggtttggtgtttggatgttggtgtgaggatgttattgattggtagtgtatgtttagtgtgggtgttgtggattttgagttgttgtgtttggattggaatgatttgtgatgtaatgttttggggaatttgtagttgttggaggtggaggttgtggatgtgattgtttagtatatggagtggttgaatgtgtgttatggtgggtatgggggtggttgaatgtgtgttagggtggttttggaggtggggatagttg

SEQ ID NO: 15607 - DNA, 414 bp, synthetic construct
  misc_feature 1..414: note = Description of Artificial Sequence: Synthetic polynucleotide
  source 1..414: mol_type = other DNA
ygtgttagygttaggttggatttagygagtygtygatgttagygagatgttaggttggatttagtaagtygtygatgttagttagaygtagagtagagaaygttggttaaagagtagttaggyggtgtttgttyggtygaagtttagtttyggagaggtaggttttgtattaggaygtggaggtttyggggttatgaaatttttagggtgagagataaaggtagtgagtggtygtttagggtagaggggayggaggtagtaygyggayggagttttygtatagagygttayggttaygattggaaagtttagataygtgttaygagtttatagtttaggttagaggyggtaggatggygggyggttttatgtatagaattgyggttaygtgtggaaggygayggatattggygg

SEQ ID NO: 15608 - DNA, 987 bp, synthetic construct
  misc_feature 1..987: note = Description of Artificial Sequence: Synthetic polynucleotide
  source 1..987: mol_type = other DNA
ygaggagttygygtttttaggattggattgatttattttgaggttgaygatgggtayggttgygyggtyggtayggygtaygatgttgtataggttttgtaggygygaggataggaaggygyggaaggtgttygttagttttayggttygygtttgttggaagtattggaagtyggtttygyggatgtttygtatgtygtttgatagggggttgttgagygtaattaggtggagttgyggggagaggggygygttaygggttgtgttttaygttgttttttgtatttaggtttygggygtattatttyggtttygtatttgtgtggataggtayggtygaggggygttgagygggaggygygtaagtgatatattgaggggtttaggtagtagtttttataygttgttaggttagagtagtttygggttaygtgggtgtttttagttgtygttgtaggyggaggtaygtyggttttttaaggatgtgatagyggttggatttttatgattattgtttggttattagagggtaagttttagggttagttaagtygttttgagtggttttgagtygttagatttttatttatggtygaagtttgggatttttagtagttttgtaggggttgggtttttttttgttgtygagagtygaggggttagatggagttaagtttattttgggggggtatttattatyggttggaagtygyggtggttgtgggygggtgggtttgtgggtygygtyggtygtaggtgtaygtaggagttgtggtgyggggtttyggggtagggttggggttygggtaggygaggggggttggttaggatgttatttgttygttagggtygygyggtggggtgggggtgttttygtygygggtaggggttgttgtygtgtagttgtattayggggggttgtaaggyggttattttattgttttgtaggtgggagaygtggggtttgtyggyggggggatttttygg

SEQ ID NO: 15609 - DNA, 1061 bp, synthetic construct
  misc_feature 1..1061: note = Description of Artificial Sequence: Synthetic polynucleotide
  source 1..1061: mol_type = other DNA
yggggtagggggyggttgtygtaagggtgggattygygggtttygaggtttttttggtggtggagaygygtygaggtygtttttattttaagttttttttttaggtggtgagtyggttgggtttggattttttgtgtttttttagttttaaggagyggattatygagtgagtttttgttttttygttttttttttatttttttygggttttgtttttygggttttgyggggygttggggtttttgygtggagattyggttgagtttttttagygtttttttttgggygtttattyggtttgygttaagtyggggtttgggggttgaggggggtatagagatttyggtygggttttygtaggtttttagtygagtggttattttttygtgggtgtagaygggygtggggtttggggtygtttygggaggattgygttttttttattaatttyggttagattygttgagtygygtttattttgtaggtatttggtttttgagygygggtttgagygaggtttgggtagtaagtttttgygygttttygtgggggaggtgggtgttygttttgyggttttygggggyggttyggtggyggyggtygttgyggttatggtgagygyggggggaggggtaggggaggygtagttgttggggggagggyggggagggggaagggygttgttggggggagggtayggggtggggagggygyggtggggtygttttgggtggagaygtgggggttataygggtgggattttygtagggattattygggtttttggttttttttggggtyggtttygggtygtttggggtttttgygatttttatatttatttttttygtagggtgyggygttgggttttatggtgggttttatgatttaygggyggygttaattttagtttttggataygaygatgyggygtttgatttygttttttygygaggtttyggttaagttaattaygttggtggatgtygaygtygaggtttttatygtttatttggtgagtggyggttatagtagggtttttygggttttattaatagyga

SEQ ID NO: 15610 - DNA, 382 bp, synthetic construct
  misc_feature 1..382: note = Description of Artificial Sequence: Synthetic polynucleotide
  source 1..382: mol_type = other DNA
yggayggtaaataygygtgggtttttygtgtgtttgayggtaaagatgtatgggttttttgtgtgtyggatggtaaataggtttygtgtgggttttttgtgtgtyggatagtaaatataygtgggttttttttgtgtyggatagtaaatataygtgggttttttttgtgtyggatagtaaataygygtgggtttttttgtgtyggatagtaaataygygtgggttttttttgtgtyggatagtaaataygygtgggtttttttgtgttaaayggtaaataygygtgggtttttygtgtgtygaatagtaaataygygtgggttttttttgtgttygatagtaaataygygtgggtttttygtgtgtyggatgataaataygt

SEQ ID NO: 15611 - DNA, 261 bp, synthetic construct
  misc_feature 1..261: note = Description of Artificial Sequence: Synthetic polynucleotide
  source 1..261: mol_type = other DNA
ygtygattaggaggatyggtggygatttyggtttttagtgttttygatagagtgaaatggyggyggyggtygggatgatgttgttgggtttgttataggygggtgggtaggtgttgggttaggygatggaggaggtggtaggyggtaattttttgtttatgttgttgatygtttgygtttttatttttagtttggtttatttgtttygtttygttgtyggttatttggtttagttgatygtaggggygaaaagtttttygt

SEQ ID NO: 15612 - DNA, 892 bp, synthetic construct
  misc_feature 1..892: note = Description of Artificial Sequence: Synthetic polynucleotide
  source 1..892: mol_type = other DNA
ygyggggttgtttaagygttggyggaggtygggttgggtygttgtgygtttgtttttttttttygygttttttttgtygttttaattttgttttggttaygagggagtttgtgtttaygtagatygggtagtgygggaattagatyggygttaaggttggtagtyggggttttgagggtttagttygggtttgtygggtggtyggggaagatgttggtagyggygggggyggtgtttttgtattgyggtttttgggttttttgtyggggayggtggaatygggtggttggygaggyggygggggtggattttagggatagggyggtttggggatgggggtgyggatgggggtgggagagyggttggggygttttygtgatttagtttyggtttgtttggtttttttygttttygtagttttgggaggtgatttttgatgaatatgttatygatttygttggtatttattayggggatagttatttgtagttggagygtattaaygtgtattattaygaggttagyggtgygattttygttttttttttatygtttttttgggaaygyggtttttttttygtttatgttttttygttttaygtaggtggtaggtaygtgtttygygttgtgttygtggatttggagtygggtattatggattttgtgygttyggggtttttygggtaggtttttaggttagataattttatttttygtgagttgygggygaggattggggtgyggttttttagttagggtagttygaaatttaggaaygttttaaggttattttgtgggaattgtggygttagggtttttgaatatttttttgtttttygagtygagtygttttatttgttttttaaaygggtttygggaggaaggttygygt

SEQ ID NO: 15613 - DNA, 682 bp, synthetic construct
  misc_feature 1..682: note = Description of Artificial Sequence: Synthetic polynucleotide
  source 1..682: mol_type = other DNA
ygtttagtaggyggtattgygttttgaygtyggggatttagtatttagtygttttygttygtaggtgttttggttttgtttyggttttttttggtttgtgttttgattttgtttttygtygtttagaaygtygtagttagggyggtatataagtttygaggggyggggttygggggttttttttttattygtttttygtttttttttttgttggatttgaggygtygttttygtygygttgttttygygttatgttaygttaygttaygttaygttaygttaygtttttaygttaygtttaygttaygtttttatttttygtttatagggaaaygggtttyggygatgtgagggygtttgtygtgtttggtgtttttataggggagttttttgttttggtygyggttttaggttttgtgttgaygtagtaggagggttttygggtagtttaggtaggygayggggagtgaygagggttttttatagttatgggagtygagtttagagtaggyggtagtagygtttttgttatttttggtttaaaagtagtygtgtggggtttttgataggtgtttyggagygaattgttttttttggtttagtttttagggttttgttagggtttttgttgtttagaaggttyggggttyggttgaygattygttatatygtgggttttygg

SEQ ID NO: 15614 - DNA, 223 bp, synthetic construct
  misc_feature 1..223: note = Description of Artificial Sequence: Synthetic polynucleotide
  source 1..223: mol_type = other DNA
ygaaaaatagaggygttgggtgygaggyggagagatgtataggtttggtttyggtttygttttttgtttgttttaaagggtaaggttttttygtttygygtttygtttttgttttatttaggtttygttattatgttygggggttttattygggattggtttttgttttgygtagtaaattyggaagtggattaygtggagtaaaggttttatygaggygygt

SEQ ID NO: 15615 - DNA, 255 bp, synthetic construct
  misc_feature 1..255: note = Description of Artificial Sequence: Synthetic polynucleotide
  source 1..255: mol_type = other DNA
ygggaggtygggttyggtgtatgggggtygggtatattttttttgggtatttttaggataggygaggaaygtatyggtygggattttatttaygagtaggagggtaaggtgtagtttgtgattgatgyggtgtaygttattgtttaygttttttatagtatgtattaggygttttgttttgggtatataggtttgtgttyggygatggaatttattgatgggyggatgtttttgtagtatattygagttgttygt

SEQ ID NO: 15616 - DNA, 309 bp, synthetic construct
  misc_feature 1..309: note = Description of Artificial Sequence: Synthetic polynucleotide
  source 1..309: mol_type = other DNA
yggtaggtttgttgygttygttttagttagggtttagagtttttyggttagtttatygtatttggattttagatgggygygttgggtggtgttygygttagggaaagagttggyggttggttgagttgttgygtttttgagygttgtgttygttgtgattattggygtggttgtttttyggtaggttygaaggaatygttgtttttttgtaygttgayggttagygaggaggttatggyggtgttggaggaggtggtgttgtaygttttttagtagtgygtttattatgtttttaaggtgtayggaygg

SEQ ID NO: 15617 - DNA, 992 bp, synthetic construct
  misc_feature 1..992: note = Description of Artificial Sequence: Synthetic polynucleotide
  source 1..992: mol_type = other DNA
ygtgtgttttttygggaaatygattttttttgggatgggttyggatatygaggggygggtttttgagagtygtyggggttttggtgtgggggtggttagggatatggagagttygtggygatagtattttagttaygttgttttagtaattagtgattagataygggaygtttttttygtgtgttgttygygttaygtttgttttgagyggagtttttgttttaggatagtttggtgtatgtgtttaatygggatyggtatayggtgggttagyggattttttttagtaagtttagtattagttttttagttttygatattttgtttttatattgtattattygtyggtaatygttttyggatagyggttaggtygyggggaggttggttttggagtttattttyggggygtatattttygttaattttttygaggtggggtataggatygtggtgttgtattayggggatttgttttttttggggttttattatttgttgttatttaaggatttygygtaggtttagtttttgttygttygggttttggygygttttygggttgtgtygtagagttgtyggttgtgyggggtygygttyggggttyggggagtygttttttttatttaggtygttttgtttyggygttagtagttgtttttggagtttgagttttatttggaggataygttgttgtagaggattatgaygttgatygagtyggggggygaygattataagttgattttygttttttttttgtgtttttgtatttagtattyggttatttatttttagtygggtatattygggtagtttttgtttaagatagttaggttgattygygagattgtttgggttagtgtgttggggtgggyggtttgggttttgtgtyggtttgggggaagagggggttyggagttggtttyggttgggaggygggagygtttttatttgatttttayggtgttgtgttgttgagygtagggygg

SEQ ID NO: 15618 - DNA, 265 bp, synthetic construct
  misc_feature 1..265: note = Description of Artificial Sequence: Synthetic polynucleotide
  source 1..265: mol_type = other DNA
yggggttgttygtgaataygttaagtataayggggttgttgatygtgaataygtygaataaaatagggttgttgttygtgaataygttaaataaaatggggttgttgttygtgaatatgtygaataaaattgggagttygaatttttttatgttaaataaagagtagggttygaattttttttttaggagggttagggttgyggtygggygaygttaggtggggaagatattagaagaggagaaaattaggagygtaggaygygg

SEQ ID NO: 15619 - DNA, 488 bp, synthetic construct
  misc_feature 1..488: note = Description of Artificial Sequence: Synthetic polynucleotide
  source 1..488: mol_type = other DNA
ygttygtgtttggygggagaggatayggttttttaggygygttgtagaagttgattggagaaggttygygattttgttgagggttaaagaggaatyggaaagggttyggggtagaygtgggygttatagggtgagtygggttaggttgagaggatttaygggttatgggagtttgtgggygayggttyggtaggggtttgyggygggaatagggataaaatatatttaataaattgtttatttagagtaagttgtgtgggtataatggygagaaaayggttagtaatggagaygttgtttygtagtygtttatttttttttttttaggygygtattggayggttgagygattgtgaggttttagtggggttggtgatagaattaaggygygtygaagygygyggtagtattttygttttagggygtttattagaggggtaaaagggtaaaagagagagttttttttttattaygttygttttygtygg

SEQ ID NO: 15620 - DNA, 676 bp, synthetic construct
  misc_feature 1..676: note = Description of Artificial Sequence: Synthetic polynucleotide
  source 1..676: mol_type = other DNA
ygtyggatgaattttgtttttttagaagaaagtygggttggtgtgttygatgaygtagygtttgtagtggygtttgataaagygtagggtttttayggagatttygtagttttggatatttagygtttggaggttaaagtagttggyggttaygatttgtaagttttggtyggtgatgttttygtaggatttgaggttgagtygtttgaggttgaagtagtttagggttaggtattttaggttygtgtyggatattaaagggtatttgtygatatttagggatttgagtttggtgtagtttttggygaggtattttatatygtggttygtgatgttttygtagtttttygygttgaggtagygtagtttgttgtagtatttggttaygtagyggatgtttaygtyggtgattyggtygtagtgygygatgtttaggtatygtaggygggattttagtttggygatttttygtaggtygaagtygttgaygaagyggtagtygttgaygtttagttttttgatggaggygtagtagattattaggtagygtaggttttygtyggttaggyggaygtagyggygtaggtagaggtgggtgagttgygtgtagtgygtygygatggtgtgtaggttttygttttttagtaygaagtagttygttatgtttaggtagygg

SEQ ID NO: 15621 - DNA, 1238 bp, synthetic construct
  misc_feature 1..1238: note = Description of Artificial Sequence: Synthetic polynucleotide
  source 1..1238: mol_type = other DNA
ygatagattatttaggtygtatagagygygtgtataaggtygtygttttttttgtgaygtaagattttattttttggatgttagyggtttggaagygtaaygttttttgggtaaygttattgtygtagtttygggtgggggagggatgattaaagataayggttgtaagagaattttataagagagttagaaygaaaatgtgtaataagtgyggyggtttttattatggtaggtgattygaggatttagtaygaggygagagtagggattaggaagagtyggaaaattygtttgtgattggtygtttaygggtatyggtygttgtgattgggtgaggtttagatagatagttgygttttgaatygygtagggttttgggtagtaaaggttttgtaaggtttttaatygaaagggggagggggaaggtygttaataaayggttgagtttataattttggtyggggygttttttttttttatggagagagttagattygagtygtygttttagtygygttygttgygtttygtttygttttygttgtyggtygagggtatttttttttgggtagtagttatggagtttttttygtygttttttatattgagygyggtagttagtgygattttggtttygtygtgyggggaggtagtggygttyggtttatagttygyggtgyggyggttgttgtaggtgaagttagagtaggtgttgttgttattatagttttaggtttagaaygaggaagtygttgtttygttygygtaggygyggttgttgtagtttaggttygatttgyggtttttgtagtygtygatagygttagayggygttatttttaggttygagttgtattyggtgtagtttttggygttgtatgttaaggttaagaagtagaagttggggtttagtttggattagttagtggggtttygaggggtygtygaaatyggttttagagtttttagggtggttaagttggaaggtttygggtyggttttyggttattttygaggggaygagaagggtaagttggaggyggaggaggttatgagagattygatgtaaggyggggtaggtaaaagttyggtagttattygagaaggtgtgattaaaayggaggaattygagagatttttygaggattgtaggttyggygyggagttygygtttaatggtttggtttatggtagygyggaggttattttggttttaaygttyggtgtttttgggtygt

SEQ ID NO: 15622 - DNA, 220 bp, synthetic construct
  misc_feature 1..220: note = Description of Artificial Sequence: Synthetic polynucleotide
  source 1..220: mol_type = other DNA
ygggataggttgggygtyggtatttagtggtygtaggggttgtygtgtgttttgtagatggataygygttatttaatatagagatgygttgagttygggtgattagtgaatygtaygttatygtagatattagaaagygaaagtataygggggaaggtttygggtatagatttagtayggttattattygagttggagttgtttgygagaygatgagygt

SEQ ID NO: 15623 - DNA, 631 bp, synthetic construct
  misc_feature 1..631: note = Description of Artificial Sequence: Synthetic polynucleotide
  source 1..631: mol_type = other DNA
yggtattttaagtaygygagtttgygtaggaggygtttygtttttyggagttttttattgttttttagatatagtttyggttttttatttygggyggaggtttttttagaygggtttygattgtttttgtatgtttattgttgtygtgttagaagttattgtttttttttygtttttttttaaatgtgttttgttttaggttygtgttatgttgttttttgtgtygttttygttygtttttttatttttygttattagaatygggaaggyggtgttttttttttaggtttaattttyggtattgaatttttaggagttygtagtttttttygttygggttttttttygttggtttagatygtagggttagtagtttygtttatayggaagtttygtttattaggtygatttygttttttttgtttyggtttygttttygttttggtttygttttttygttggtagtyggtaggygtagtyggggtygtgggatttaggaggggtttttagtaggtgttttggygaagattttggattgygttatagtttagggtagtygtttygyggttyggttttggagttttttayggatattyggggttttgtttttttygaaattattttttatygt

SEQ ID NO: 15624 - DNA, 904 bp, synthetic construct
  misc_feature 1..904: note = Description of Artificial Sequence: Synthetic polynucleotide
  source 1..904: mol_type = other DNA
yggtagaagattygttttttttygtttgaaaggtgtygtttagttggtagygtaatggtaggagttygggttaygygagygyggggtggatgttggaggggaaggtygggagttggtttygtggaaaaggtttttgygtgtttyggaatatgttgttgggtyggtggatttygttgtttatttttgtggatgaaatatgtatgttatattatataagggattaggtggaagaatgaataggttggtttaagtataygttttggttggtgttyggagagtgggtatttttttttgttatattgaggagttgtttttttagayggaygtgatatgattttttyggttttttattgttatagygygagaggygggggtttgagattygaygttgtttaggttatagtagygggyggygtgtyggtaggtgygygtttgttagattyggygtgagtgtagtttaataaygaatttgtaggttgtttgtygttatgtaygtggttatygttttagttttgtttttttttaggtttygggatgttyggggtgaatggggaggyggtygttttaagggaggatttaggtagygtyggtttttygtttggggtttttttttagattttygtttgaaygagtgggatagtttttgttttttagygygtttttaggtttygggatggttattgtttaggaggygtttggttttgtttattygttygttttgtttattttttgagaatttygygatttygaaatttttttgatttttttgtyggaagtaatttgttttaygtgaaattaygggttatttttttatatttgtagagygttttattttttgtaaygtttatttgygaaattgttgygttaggttaggagtattttaagagygagaggtagaygtygt

SEQ ID NO: 15625 - DNA, 519 bp, synthetic construct
  misc_feature 1..519: note = Description of Artificial Sequence: Synthetic polynucleotide
  source 1..519: mol_type = other DNA
yggyggtygtatttttygtagaygygtayggtttaggttgygatgatttaggaggagatgttgaagattagtagtayggtgtyggggtagatggttatgagtgtttttatgaygaagygygtgttgaaggtgattttgttgagggtttygatgttgyggttygaggygttygtgaagattttgttgtgtagtagtattattyggtttagtaggtagaggygtaggaatatggggatggatagtagtaygtttaygtyggtttyggttatygagggygygtaygtgaaggttagtygygtygtttaygtgaagyggtagtggtygggtatygggtgaatggygtatattgttagttttagygagatgaggaataygygttygtaggttatggygatgygttagttattagtttygttgtttattatgaatagttgtggagggygggagggaattagttatgggtgttagataygygtygygttttttgtttagttttatygygtttttagagagtgaygt

SEQ ID NO: 15626 - DNA, 204 bp, synthetic construct
  misc_feature 1..204: note = Description of Artificial Sequence: Synthetic polynucleotide
  source 1..204: mol_type = other DNA
ygygtagggaggtgtagaygtaggttygtggggaggtaygtggtagtaggatttatttttggggtgtttygggtyggtgaatttatatttttttaygttaatggttygtagtatttgtagttygtgggtygagtyggttgtggggggtttattggtggtaggggtattattggggagagtggyggayggttgggttggyggygg

SEQ ID NO: 15627 - DNA, 444 bp, synthetic construct
  misc_feature 1..444: note = Description of Artificial Sequence: Synthetic polynucleotide
  source 1..444: mol_type = other DNA
ygtggtygattgttattttatttygaaataygtagaggggaaggtagttygagggtttttttttttaggaagtttttgggtagttgtygtygggygttaggataagygagggtggtttgagttttgtgtttatatggygtatgtygtttagtagatgatattgayggtygtaaaygtygtagggaatatagygygggygtaaatgttaatggtgtttgygtygatgggtttgagtygggtayggatgtttttttggttttttgagygggttgtttttttttttttygttttttttgtttttatttttatygatttgtaggagtttattaggtttttygggaygyggygttgtyggygggagatggttagtttttgygtgaygtyggtagtagagagggagaagaggataatggygttttttaygtttatttgtaygaaggtygg

SEQ ID NO: 15628 - DNA, 397 bp, synthetic construct
  misc_feature 1..397: note = Description of Artificial Sequence: Synthetic polynucleotide
  source 1..397: mol_type = other DNA
yggaagttgagtgygtttygagtaggtttattatttagggtgggggtgggyggaygtgtttttatygtttgtygtyggtttttagttggttttggygaggtaggagtttttggggttatttgttygggtttatttttgtttyggtttygtagtgtttgyggagttyggtgggaggagtyggtttgagttattgttattattyggttttttttgttgagagtggatttygtgygtgtgttttttaggaayggtgataagtaygayggygattgggttygggatyggygttagggatayggggtgttgygttgygtygayggttttatttataaggtattygggggygygyggtatttgttgtttagagggtataggtttygtggtgggtagggygygt

SEQ ID NO: 15629 - DNA, 1530 bp, synthetic construct
  misc_feature 1..1530: note = Description of Artificial Sequence: Synthetic polynucleotide
  source 1..1530: mol_type = other DNA
yggttgttttygtttttaaaatygttttggygygygttyggtygtttttatattygtygtggygygygtttagtygttttatgtattgagyggttaygtttayggttttygttttyggtagttgtaggtttttygaaaygttgtatygtaggtygttttagttygagygtagtagttygaagtttayggygtttaygttgaaygtgygttgttagtygatggygtttttaygttagygttygagygtygggttygyggttttttygttgtttttygaygyggtttygtygttyggggttttatygttttttttttttttttttttttygttttttttgggtagttgyggttyggatatttgggataagtttaggaaggaggttaygggtygygtttyggaggataagtttgagtttattgtgggygtygtaggttttagygtgygygtttggttttttyggtttttttgggtggtttgygttygggttgggggtttyggttgtgtggtttgggggtygtyggttttgyggtygtggggtyggggtgggygtgggggygttygtagttgtattttgggtagaggtttggggtgtaggaagaygttagggaagggyggttagggygtaygyggygttggggttyggggggatgttygttgtttyggtygtattttggttaygtatatttttgggggyggttgttttattgtagggygygggggyggagttyggtttaagaagagyggtaaagggygggyggttttggyggtttagtttagggttygggagtgtttgggggttttttygtttygggggyggggaggggtyggyggggygagggtggtttygggttgggygggggttgttggggygggggattgggggtygtttttgggyggggtygtttyggtgggttttaggttgtygagtagttttttttygttttygtygtttaggaagtttgygggaaaygygggttagaagttttttgygtaggtgggtgygggttaggggygttgyggatatttatygttygggttgaggaagaggaaggttyggygttgtatttygttttttttatttttattttttttttttttgtttatttttatgtatttatagaatttaaatttggggygyggyggggtattagagtygagtttygtttygtttatttygtttygtattagttyggtygygygtttatttttttagatatagyggagattygyggtagaagtatttgttgttygtttttatgtgggtgaggygagtgtagtygttgggataaaygaaggataggtatatttggggggtgggggggygtagggtttagggygyggatttttyggggyggttttttaaggggttggagaaggtttygyggagtttyggaygggagayggggtttttagtygtatttataaattgtaggttttggtatttggygatygggaagtttttgattaygtaggtgggggygtaggygtagggttttagtaygttttttaggttygaagattttatgygt

SEQ ID NO: 15630 - DNA, 414 bp, synthetic construct
  misc_feature 1..414: note = Description of Artificial Sequence: Synthetic polynucleotide
  source 1..414: mol_type = other DNA
tgtgttagtgttaggttggatttagtgagttgttgatgttagtgagatgttaggttggatttagtaagttgttgatgttagttagatgtagagtagagaatgttggttaaagagtagttaggtggtgtttgtttggttgaagtttagttttggagaggtaggttttgtattaggatgtggaggttttggggttatgaaatttttagggtgagagataaaggtagtgagtggttgtttagggtagaggggatggaggtagtatgtggatggagtttttgtatagagtgttatggttatgattggaaagtttagatatgtgttatgagtttatagtttaggttagaggtggtaggatggtgggtggttttatgtatagaattgtggttatgtgtggaaggtgatggatattggtgg

SEQ ID NO: 15631 - DNA, 987 bp, synthetic construct
  misc_feature 1..987: note = Description of Artificial Sequence: Synthetic polynucleotide
  source 1..987: mol_type = other DNA
tgaggagtttgtgtttttaggattggattgatttattttgaggttgatgatgggtatggttgtgtggttggtatggtgtatgatgttgtataggttttgtaggtgtgaggataggaaggtgtggaaggtgtttgttagttttatggtttgtgtttgttggaagtattggaagttggttttgtggatgttttgtatgttgtttgatagggggttgttgagtgtaattaggtggagttgtggggagaggggtgtgttatgggttgtgttttatgttgttttttgtatttaggttttgggtgtattattttggttttgtatttgtgtggataggtatggttgaggggtgttgagtgggaggtgtgtaagtgatatattgaggggtttaggtagtagtttttatatgttgttaggttagagtagttttgggttatgtgggtgtttttagttgttgttgtaggtggaggtatgttggttttttaaggatgtgatagtggttggatttttatgattattgtttggttattagagggtaagttttagggttagttaagttgttttgagtggttttgagttgttagatttttatttatggttgaagtttgggatttttagtagttttgtaggggttgggtttttttttgttgttgagagttgaggggttagatggagttaagtttattttgggggggtatttattattggttggaagttgtggtggttgtgggtgggtgggtttgtgggttgtgttggttgtaggtgtatgtaggagttgtggtgtggggttttggggtagggttggggtttgggtaggtgaggggggttggttaggatgttatttgtttgttagggttgtgtggtggggtgggggtgtttttgttgtgggtaggggttgttgttgtgtagttgtattatggggggttgtaaggtggttattttattgttttgtaggtgggagatgtggggtttgttggtggggggattttttgg

SEQ ID NO: 15632 - DNA, 1061 bp, synthetic construct
  misc_feature 1..1061: note = Description of Artificial Sequence: Synthetic polynucleotide
  source 1..1061: mol_type = other DNA
tggggtagggggtggttgttgtaagggtgggatttgtgggttttgaggtttttttggtggtggagatgtgttgaggttgtttttattttaagttttttttttaggtggtgagttggttgggtttggattttttgtgtttttttagttttaaggagtggattattgagtgagtttttgtttttttgttttttttttattttttttgggttttgttttttgggttttgtggggtgttggggtttttgtgtggagatttggttgagtttttttagtgtttttttttgggtgtttatttggtttgtgttaagttggggtttgggggttgaggggggtatagagattttggttgggtttttgtaggtttttagttgagtggttatttttttgtgggtgtagatgggtgtggggtttggggttgttttgggaggattgtgttttttttattaattttggttagatttgttgagttgtgtttattttgtaggtatttggtttttgagtgtgggtttgagtgaggtttgggtagtaagtttttgtgtgtttttgtgggggaggtgggtgtttgttttgtggtttttgggggtggtttggtggtggtggttgttgtggttatggtgagtgtggggggaggggtaggggaggtgtagttgttggggggagggtggggagggggaagggtgttgttggggggagggtatggggtggggagggtgtggtggggttgttttgggtggagatgtgggggttatatgggtgggatttttgtagggattatttgggtttttggttttttttggggttggttttgggttgtttggggtttttgtgatttttatatttattttttttgtagggtgtggtgttgggttttatggtgggttttatgatttatgggtggtgttaattttagtttttggatatgatgatgtggtgtttgattttgtttttttgtgaggttttggttaagttaattatgttggtggatgttgatgttgaggtttttattgtttatttggtgagtggtggttatagtagggttttttgggttttattaatagtga

SEQ ID NO: 15633 - DNA, 382 bp, synthetic construct
  misc_feature 1..382: note = Description of Artificial Sequence: Synthetic polynucleotide
  source 1..382: mol_type = other DNA
tggatggtaaatatgtgtgggttttttgtgtgtttgatggtaaagatgtatgggttttttgtgtgttggatggtaaataggttttgtgtgggttttttgtgtgttggatagtaaatatatgtgggttttttttgtgttggatagtaaatatatgtgggttttttttgtgttggatagtaaatatgtgtgggtttttttgtgttggatagtaaatatgtgtgggttttttttgtgttggatagtaaatatgtgtgggtttttttgtgttaaatggtaaatatgtgtgggttttttgtgtgttgaatagtaaatatgtgtgggttttttttgtgtttgatagtaaatatgtgtgggttttttgtgtgttggatgataaatatgt

SEQ ID NO: 15634 - DNA, 261 bp, synthetic construct
  misc_feature 1..261: note = Description of Artificial Sequence: Synthetic polynucleotide
  source 1..261: mol_type = other DNA
tgttgattaggaggattggtggtgattttggtttttagtgtttttgatagagtgaaatggtggtggtggttgggatgatgttgttgggtttgttataggtgggtgggtaggtgttgggttaggtgatggaggaggtggtaggtggtaattttttgtttatgttgttgattgtttgtgtttttatttttagtttggtttatttgttttgttttgttgttggttatttggtttagttgattgtaggggtgaaaagttttttgt

SEQ ID NO: 15635 - DNA, 892 bp, synthetic construct
  misc_feature 1..892: note = Description of Artificial Sequence: Synthetic polynucleotide
  source 1..892: mol_type = other DNA
tgtggggttgtttaagtgttggtggaggttgggttgggttgttgtgtgtttgttttttttttttgtgttttttttgttgttttaattttgttttggttatgagggagtttgtgtttatgtagattgggtagtgtgggaattagattggtgttaaggttggtagttggggttttgagggtttagtttgggtttgttgggtggttggggaagatgttggtagtggtgggggtggtgtttttgtattgtggtttttgggttttttgttggggatggtggaattgggtggttggtgaggtggtgggggtggattttagggatagggtggtttggggatgggggtgtggatgggggtgggagagtggttggggtgtttttgtgatttagttttggtttgtttggttttttttgtttttgtagttttgggaggtgatttttgatgaatatgttattgattttgttggtatttattatggggatagttatttgtagttggagtgtattaatgtgtattattatgaggttagtggtgtgatttttgttttttttttattgtttttttgggaatgtggttttttttttgtttatgtttttttgttttatgtaggtggtaggtatgtgttttgtgttgtgtttgtggatttggagttgggtattatggattttgtgtgtttggggttttttgggtaggtttttaggttagataattttattttttgtgagttgtgggtgaggattggggtgtggttttttagttagggtagtttgaaatttaggaatgttttaaggttattttgtgggaattgtggtgttagggtttttgaatatttttttgttttttgagttgagttgttttatttgttttttaaatgggttttgggaggaaggtttgtgt

SEQ ID NO: 15636 - DNA, 682 bp, synthetic construct
  misc_feature 1..682: note = Description of Artificial Sequence: Synthetic polynucleotide
  source 1..682: mol_type = other DNA
tgtttagtaggtggtattgtgttttgatgttggggatttagtatttagttgtttttgtttgtaggtgttttggttttgttttggttttttttggtttgtgttttgattttgttttttgttgtttagaatgttgtagttagggtggtatataagttttgaggggtggggtttgggggttttttttttatttgttttttgtttttttttttgttggatttgaggtgttgtttttgttgtgttgtttttgtgttatgttatgttatgttatgttatgttatgttatgtttttatgttatgtttatgttatgtttttattttttgtttatagggaaatgggttttggtgatgtgagggtgtttgttgtgtttggtgtttttataggggagttttttgttttggttgtggttttaggttttgtgttgatgtagtaggagggtttttgggtagtttaggtaggtgatggggagtgatgagggttttttatagttatgggagttgagtttagagtaggtggtagtagtgtttttgttatttttggtttaaaagtagttgtgtggggtttttgataggtgttttggagtgaattgttttttttggtttagtttttagggttttgttagggtttttgttgtttagaaggtttggggtttggttgatgatttgttatattgtgggtttttgg

SEQ ID NO: 15637 - DNA, 223 bp, synthetic construct
  misc_feature 1..223: note = Description of Artificial Sequence: Synthetic polynucleotide
  source 1..223: mol_type = other DNA
tgaaaaatagaggtgttgggtgtgaggtggagagatgtataggtttggttttggttttgttttttgtttgttttaaagggtaaggtttttttgttttgtgttttgtttttgttttatttaggttttgttattatgtttgggggttttatttgggattggtttttgttttgtgtagtaaatttggaagtggattatgtggagtaaaggttttattgaggtgtgt

SEQ ID NO: 15638 - DNA, 255 bp, synthetic construct
  misc_feature 1..255: note = Description of Artificial Sequence: Synthetic polynucleotide
  source 1..255: mol_type = other DNA
tgggaggttgggtttggtgtatgggggttgggtatattttttttgggtatttttaggataggtgaggaatgtattggttgggattttatttatgagtaggagggtaaggtgtagtttgtgattgatgtggtgtatgttattgtttatgttttttatagtatgtattaggtgttttgttttgggtatataggtttgtgtttggtgatggaatttattgatgggtggatgtttttgtagtatatttgagttgtttgt

SEQ ID NO: 15639 - DNA, 309 bp, synthetic construct
  misc_feature 1..309: note = Description of Artificial Sequence: Synthetic polynucleotide
  source 1..309: mol_type = other DNA
tggtaggtttgttgtgtttgttttagttagggtttagagttttttggttagtttattgtatttggattttagatgggtgtgttgggtggtgtttgtgttagggaaagagttggtggttggttgagttgttgtgtttttgagtgttgtgtttgttgtgattattggtgtggttgttttttggtaggtttgaaggaattgttgtttttttgtatgttgatggttagtgaggaggttatggtggtgttggaggaggtggtgttgtatgttttttagtagtgtgtttattatgtttttaaggtgtatggatgg

SEQ ID NO: 15640 - DNA, 992 bp, synthetic construct
  misc_feature 1..992: note = Description of Artificial Sequence: Synthetic polynucleotide
  source 1..992: mol_type = other DNA
tgtgtgtttttttgggaaattgattttttttgggatgggtttggatattgaggggtgggtttttgagagttgttggggttttggtgtgggggtggttagggatatggagagtttgtggtgatagtattttagttatgttgttttagtaattagtgattagatatgggatgttttttttgtgtgttgtttgtgttatgtttgttttgagtggagtttttgttttaggatagtttggtgtatgtgtttaattgggattggtatatggtgggttagtggattttttttagtaagtttagtattagttttttagtttttgatattttgtttttatattgtattatttgttggtaattgtttttggatagtggttaggttgtggggaggttggttttggagtttatttttggggtgtatatttttgttaatttttttgaggtggggtataggattgtggtgttgtattatggggatttgttttttttggggttttattatttgttgttatttaaggattttgtgtaggtttagtttttgtttgtttgggttttggtgtgtttttgggttgtgttgtagagttgttggttgtgtggggttgtgtttggggtttggggagttgttttttttatttaggttgttttgttttggtgttagtagttgtttttggagtttgagttttatttggaggatatgttgttgtagaggattatgatgttgattgagttggggggtgatgattataagttgatttttgttttttttttgtgtttttgtatttagtatttggttatttatttttagttgggtatatttgggtagtttttgtttaagatagttaggttgatttgtgagattgtttgggttagtgtgttggggtgggtggtttgggttttgtgttggtttgggggaagagggggtttggagttggttttggttgggaggtgggagtgtttttatttgatttttatggtgttgtgttgttgagtgtagggtgg

SEQ ID NO: 15641 - DNA, 265 bp, synthetic construct
  misc_feature 1..265: note = Description of Artificial Sequence: Synthetic polynucleotide
  source 1..265: mol_type = other DNA
tggggttgtttgtgaatatgttaagtataatggggttgttgattgtgaatatgttgaataaaatagggttgttgtttgtgaatatgttaaataaaatggggttgttgtttgtgaatatgttgaataaaattgggagtttgaatttttttatgttaaataaagagtagggtttgaattttttttttaggagggttagggttgtggttgggtgatgttaggtggggaagatattagaagaggagaaaattaggagtgtaggatgtgg

SEQ ID NO: 15642 - DNA, 488 bp, synthetic construct
  misc_feature 1..488: note = Description of Artificial Sequence: Synthetic polynucleotide
  source 1..488: mol_type = other DNA
tgtttgtgtttggtgggagaggatatggttttttaggtgtgttgtagaagttgattggagaaggtttgtgattttgttgagggttaaagaggaattggaaagggtttggggtagatgtgggtgttatagggtgagttgggttaggttgagaggatttatgggttatgggagtttgtgggtgatggtttggtaggggtttgtggtgggaatagggataaaatatatttaataaattgtttatttagagtaagttgtgtgggtataatggtgagaaaatggttagtaatggagatgttgttttgtagttgtttatttttttttttttaggtgtgtattggatggttgagtgattgtgaggttttagtggggttggtgatagaattaaggtgtgttgaagtgtgtggtagtatttttgttttagggtgtttattagaggggtaaaagggtaaaagagagagttttttttttattatgtttgtttttgttgg

SEQ ID NO: 15643 - DNA, 676 bp, synthetic construct
  misc_feature 1..676: note = Description of Artificial Sequence: Synthetic polynucleotide
  source 1..676: mol_type = other DNA
tgttggatgaattttgtttttttagaagaaagttgggttggtgtgtttgatgatgtagtgtttgtagtggtgtttgataaagtgtagggtttttatggagattttgtagttttggatatttagtgtttggaggttaaagtagttggtggttatgatttgtaagttttggttggtgatgtttttgtaggatttgaggttgagttgtttgaggttgaagtagtttagggttaggtattttaggtttgtgttggatattaaagggtatttgttgatatttagggatttgagtttggtgtagtttttggtgaggtattttatattgtggtttgtgatgtttttgtagttttttgtgttgaggtagtgtagtttgttgtagtatttggttatgtagtggatgtttatgttggtgatttggttgtagtgtgtgatgtttaggtattgtaggtgggattttagtttggtgattttttgtaggttgaagttgttgatgaagtggtagttgttgatgtttagttttttgatggaggtgtagtagattattaggtagtgtaggtttttgttggttaggtggatgtagtggtgtaggtagaggtgggtgagttgtgtgtagtgtgttgtgatggtgtgtaggtttttgttttttagtatgaagtagtttgttatgtttaggtagtgg

SEQ ID NO: 15644 - DNA, 1238 bp, synthetic construct
  misc_feature 1..1238: note = Description of Artificial Sequence: Synthetic polynucleotide
  source 1..1238: mol_type = other DNA
tgatagattatttaggttgtatagagtgtgtgtataaggttgttgttttttttgtgatgtaagattttattttttggatgttagtggtttggaagtgtaatgttttttgggtaatgttattgttgtagttttgggtgggggagggatgattaaagataatggttgtaagagaattttataagagagttagaatgaaaatgtgtaataagtgtggtggtttttattatggtaggtgatttgaggatttagtatgaggtgagagtagggattaggaagagttggaaaatttgtttgtgattggttgtttatgggtattggttgttgtgattgggtgaggtttagatagatagttgtgttttgaattgtgtagggttttgggtagtaaaggttttgtaaggtttttaattgaaagggggagggggaaggttgttaataaatggttgagtttataattttggttggggtgttttttttttttatggagagagttagatttgagttgttgttttagttgtgtttgttgtgttttgttttgtttttgttgttggttgagggtatttttttttgggtagtagttatggagttttttttgttgttttttatattgagtgtggtagttagtgtgattttggttttgttgtgtggggaggtagtggtgtttggtttatagtttgtggtgtggtggttgttgtaggtgaagttagagtaggtgttgttgttattatagttttaggtttagaatgaggaagttgttgttttgtttgtgtaggtgtggttgttgtagtttaggtttgatttgtggtttttgtagttgttgatagtgttagatggtgttatttttaggtttgagttgtatttggtgtagtttttggtgttgtatgttaaggttaagaagtagaagttggggtttagtttggattagttagtggggttttgaggggttgttgaaattggttttagagtttttagggtggttaagttggaaggttttgggttggtttttggttatttttgaggggatgagaagggtaagttggaggtggaggaggttatgagagatttgatgtaaggtggggtaggtaaaagtttggtagttatttgagaaggtgtgattaaaatggaggaatttgagagattttttgaggattgtaggtttggtgtggagtttgtgtttaatggtttggtttatggtagtgtggaggttattttggttttaatgtttggtgtttttgggttgt

SEQ ID NO: 15645 - DNA, 220 bp, synthetic construct
  misc_feature 1..220: note = Description of Artificial Sequence: Synthetic polynucleotide
  source 1..220: mol_type = other DNA
tgggataggttgggtgttggtatttagtggttgtaggggttgttgtgtgttttgtagatggatatgtgttatttaatatagagatgtgttgagtttgggtgattagtgaattgtatgttattgtagatattagaaagtgaaagtatatgggggaaggttttgggtatagatttagtatggttattatttgagttggagttgtttgtgagatgatgagtgt

SEQ ID NO: 15646 - DNA, 631 bp, synthetic construct
  misc_feature 1..631: note = Description of Artificial Sequence: Synthetic polynucleotide
  source 1..631: mol_type = other DNA
tggtattttaagtatgtgagtttgtgtaggaggtgttttgttttttggagttttttattgttttttagatatagttttggttttttattttgggtggaggtttttttagatgggttttgattgtttttgtatgtttattgttgttgtgttagaagttattgttttttttttgtttttttttaaatgtgttttgttttaggtttgtgttatgttgttttttgtgttgtttttgtttgtttttttattttttgttattagaattgggaaggtggtgttttttttttaggtttaatttttggtattgaatttttaggagtttgtagttttttttgtttgggtttttttttgttggtttagattgtagggttagtagttttgtttatatggaagttttgtttattaggttgattttgttttttttgttttggttttgtttttgttttggttttgtttttttgttggtagttggtaggtgtagttggggttgtgggatttaggaggggtttttagtaggtgttttggtgaagattttggattgtgttatagtttagggtagttgttttgtggtttggttttggagttttttatggatatttggggttttgttttttttgaaattattttttattgt

SEQ ID NO: 15647 - DNA, 904 bp, synthetic construct
  misc_feature 1..904: note = Description of Artificial Sequence: Synthetic polynucleotide
  source 1..904: mol_type = other DNA
tggtagaagatttgtttttttttgtttgaaaggtgttgtttagttggtagtgtaatggtaggagtttgggttatgtgagtgtggggtggatgttggaggggaaggttgggagttggttttgtggaaaaggtttttgtgtgttttggaatatgttgttgggttggtggattttgttgtttatttttgtggatgaaatatgtatgttatattatataagggattaggtggaagaatgaataggttggtttaagtatatgttttggttggtgtttggagagtgggtatttttttttgttatattgaggagttgtttttttagatggatgtgatatgatttttttggttttttattgttatagtgtgagaggtgggggtttgagatttgatgttgtttaggttatagtagtgggtggtgtgttggtaggtgtgtgtttgttagatttggtgtgagtgtagtttaataatgaatttgtaggttgtttgttgttatgtatgtggttattgttttagttttgtttttttttaggttttgggatgtttggggtgaatggggaggtggttgttttaagggaggatttaggtagtgttggttttttgtttggggtttttttttagatttttgtttgaatgagtgggatagtttttgttttttagtgtgtttttaggttttgggatggttattgtttaggaggtgtttggttttgtttatttgtttgttttgtttattttttgagaattttgtgattttgaaatttttttgatttttttgttggaagtaatttgttttatgtgaaattatgggttatttttttatatttgtagagtgttttattttttgtaatgtttatttgtgaaattgttgtgttaggttaggagtattttaagagtgagaggtagatgttgt

SEQ ID NO: 15648 - DNA, 519 bp, synthetic construct
  misc_feature 1..519: note = Description of Artificial Sequence: Synthetic polynucleotide
  source 1..519: mol_type = other DNA
tggtggttgtattttttgtagatgtgtatggtttaggttgtgatgatttaggaggagatgttgaagattagtagtatggtgttggggtagatggttatgagtgtttttatgatgaagtgtgtgttgaaggtgattttgttgagggttttgatgttgtggtttgaggtgtttgtgaagattttgttgtgtagtagtattatttggtttagtaggtagaggtgtaggaatatggggatggatagtagtatgtttatgttggttttggttattgagggtgtgtatgtgaaggttagttgtgttgtttatgtgaagtggtagtggttgggtattgggtgaatggtgtatattgttagttttagtgagatgaggaatatgtgtttgtaggttatggtgatgtgttagttattagttttgttgtttattatgaatagttgtggagggtgggagggaattagttatgggtgttagatatgtgttgtgttttttgtttagttttattgtgtttttagagagtgatgt

SEQ ID NO: 15649 - DNA, 204 bp, synthetic construct
  misc_feature 1..204: note = Description of Artificial Sequence: Synthetic polynucleotide
  source 1..204: mol_type = other DNA
tgtgtagggaggtgtagatgtaggtttgtggggaggtatgtggtagtaggatttatttttggggtgttttgggttggtgaatttatatttttttatgttaatggtttgtagtatttgtagtttgtgggttgagttggttgtggggggtttattggtggtaggggtattattggggagagtggtggatggttgggttggtggtgg

SEQ ID NO: 15650 - DNA, 444 bp, synthetic construct
  misc_feature 1..444: note = Description of Artificial Sequence: Synthetic polynucleotide
  source 1..444: mol_type = other DNA
tgtggttgattgttattttattttgaaatatgtagaggggaaggtagtttgagggtttttttttttaggaagtttttgggtagttgttgttgggtgttaggataagtgagggtggtttgagttttgtgtttatatggtgtatgttgtttagtagatgatattgatggttgtaaatgttgtagggaatatagtgtgggtgtaaatgttaatggtgtttgtgttgatgggtttgagttgggtatggatgtttttttggttttttgagtgggttgttttttttttttttgttttttttgtttttatttttattgatttgtaggagtttattaggttttttgggatgtggtgttgttggtgggagatggttagtttttgtgtgatgttggtagtagagagggagaagaggataatggtgttttttatgtttatttgtatgaaggttgg

SEQ ID NO: 15651 - DNA, 397 bp, synthetic construct
  misc_feature 1..397: note = Description of Artificial Sequence: Synthetic polynucleotide
  source 1..397: mol_type = other DNA
tggaagttgagtgtgttttgagtaggtttattatttagggtgggggtgggtggatgtgtttttattgtttgttgttggtttttagttggttttggtgaggtaggagtttttggggttatttgtttgggtttatttttgttttggttttgtagtgtttgtggagtttggtgggaggagttggtttgagttattgttattatttggttttttttgttgagagtggattttgtgtgtgtgttttttaggaatggtgataagtatgatggtgattgggtttgggattggtgttagggatatggggtgttgtgttgtgttgatggttttatttataaggtatttgggggtgtgtggtatttgttgtttagagggtataggttttgtggtgggtagggtgtgt

SEQ ID NO: 15652 - DNA, 1530 bp, synthetic construct
  misc_feature 1..1530: note = Description of Artificial Sequence: Synthetic polynucleotide
  source 1..1530: mol_type = other DNA
tggttgtttttgtttttaaaattgttttggtgtgtgtttggttgtttttatatttgttgtggtgtgtgtttagttgttttatgtattgagtggttatgtttatggtttttgtttttggtagttgtaggttttttgaaatgttgtattgtaggttgttttagtttgagtgtagtagtttgaagtttatggtgtttatgttgaatgtgtgttgttagttgatggtgtttttatgttagtgtttgagtgttgggtttgtggtttttttgttgttttttgatgtggttttgttgtttggggttttattgtttttttttttttttttttttttgttttttttgggtagttgtggtttggatatttgggataagtttaggaaggaggttatgggttgtgttttggaggataagtttgagtttattgtgggtgttgtaggttttagtgtgtgtgtttggtttttttggtttttttgggtggtttgtgtttgggttgggggttttggttgtgtggtttgggggttgttggttttgtggttgtggggttggggtgggtgtgggggtgtttgtagttgtattttgggtagaggtttggggtgtaggaagatgttagggaagggtggttagggtgtatgtggtgttggggtttggggggatgtttgttgttttggttgtattttggttatgtatatttttgggggtggttgttttattgtagggtgtgggggtggagtttggtttaagaagagtggtaaagggtgggtggttttggtggtttagtttagggtttgggagtgtttgggggtttttttgttttgggggtggggaggggttggtggggtgagggtggttttgggttgggtgggggttgttggggtgggggattgggggttgtttttgggtggggttgttttggtgggttttaggttgttgagtagtttttttttgtttttgttgtttaggaagtttgtgggaaatgtgggttagaagttttttgtgtaggtgggtgtgggttaggggtgttgtggatatttattgtttgggttgaggaagaggaaggtttggtgttgtattttgttttttttatttttattttttttttttttgtttatttttatgtatttatagaatttaaatttggggtgtggtggggtattagagttgagttttgttttgtttattttgttttgtattagtttggttgtgtgtttatttttttagatatagtggagatttgtggtagaagtatttgttgtttgtttttatgtgggtgaggtgagtgtagttgttgggataaatgaaggataggtatatttggggggtgggggggtgtagggtttagggtgtggattttttggggtggttttttaaggggttggagaaggttttgtggagttttggatgggagatggggtttttagttgtatttataaattgtaggttttggtatttggtgattgggaagtttttgattatgtaggtgggggtgtaggtgtagggttttagtatgttttttaggtttgaagattttatgtgt

SEQ ID NO: 15653-15654 - skipped (2 entries)

SEQ ID NO: 15655 - DNA, 36 bp, Homo sapiens; identical to SEQ ID NO: 12683
  source 1..36: mol_type = unassigned DNA

SEQ ID NO: 15656 - skipped

SEQ ID NO: 15657 - DNA, 181 bp, Homo sapiens; identical to SEQ ID NO: 12705
  source 1..181: mol_type = unassigned DNA

SEQ ID NO: 15658 - DNA, 369 bp, Homo sapiens; identical to SEQ ID NO: 12716
  source 1..369: mol_type = unassigned DNA

SEQ ID NO: 15659 - skipped

SEQ ID NO: 15660 - DNA, 35 bp, Homo sapiens; identical to SEQ ID NO: 12738
  source 1..35: mol_type = unassigned DNA

SEQ ID NO: 15661 - DNA, 487 bp, Homo sapiens; identical to SEQ ID NO: 12749
  source 1..487: mol_type = unassigned DNA

SEQ ID NO: 15662 - DNA, 28 bp, Homo sapiens
  source 1..28: mol_type = unassigned DNA
cgtcttgatctcctgacctcgtgatccg

SEQ ID NO: 15663 - skipped

SEQ ID NO: 15664 - DNA, 18 bp, Homo sapiens
  source 1..18: mol_type = unassigned DNA
cgcgccttcctgaccgcg

SEQ ID NO: 15665 - DNA, 18 bp, Homo sapiens
  source 1..18: mol_type = unassigned DNA
cgcaggtcagtgagtgcg

SEQ ID NO: 15666 - DNA, 87 bp, Homo sapiens; identical to SEQ ID NO: 12794
  source 1..87: mol_type = unassigned DNA

SEQ ID NO: 15667 - DNA, 11 bp, Homo sapiens
  source 1..11: mol_type = unassigned DNA
cggagcttgcg

SEQ ID NO: 15668 - skipped

SEQ ID NO: 15669 - DNA, 167 bp, Homo sapiens; identical to SEQ ID NO: 12825
  source 1..167: mol_type = unassigned DNA

SEQ ID NO: 15670-15672 - skipped (3 entries)

SEQ ID NO: 15673 - DNA, 185 bp, Homo sapiens; identical to SEQ ID NO: 12829
  source 1..185: mol_type = unassigned DNA

SEQ ID NO: 15674 - DNA, 17 bp, Homo sapiens
  source 1..17: mol_type = unassigned DNA
cgagccgaagcagggcg

SEQ ID NO: 15675 - DNA, 135 bp, Homo sapiens; identical to SEQ ID NO: 12831
  source 1..135: mol_type = unassigned DNA

SEQ ID NO: 15676 - skipped

SEQ ID NO: 15677 - DNA, 71 bp, Homo sapiens; identical to SEQ ID NO: 12833
  source 1..71: mol_type = unassigned DNA

SEQ ID NO: 15678 - DNA, 54 bp, Homo sapiens; identical to SEQ ID NO: 12834
  source 1..54: mol_type = unassigned DNA

SEQ ID NO: 15679 - skipped

SEQ ID NO: 15680 - DNA, 29 bp, Homo sapiens
  source 1..29: mol_type = unassigned DNA
cgccggtttttaagcccgtaggaaaagcg

SEQ ID NO: 15681 - DNA, 18 bp, Homo sapiens
  source 1..18: mol_type = unassigned DNA
cgctttctagtgtctgcg

SEQ ID NO: 15682-15683 - skipped (2 entries)

SEQ ID NO: 15684 - DNA, 24 bp, Homo sapiens
  source 1..24: mol_type = unassigned DNA
cgaagcgcctcctgcgcagactcg

SEQ ID NO: 15685-15687 - skipped (3 entries)

SEQ ID NO: 15688 - DNA, 12 bp, Homo sapiens
  source 1..12: mol_type = unassigned DNA
cggggcaggtcg

SEQ ID NO: 15689 - skipped

SEQ ID NO: 15690 - DNA, 80 bp, Homo sapiens; identical to SEQ ID NO: 12875
  source 1..80: mol_type = unassigned DNA

SEQ ID NO: 15691 - skipped

SEQ ID NO: 15692 - DNA, 3039 bp, Homo sapiens; identical to SEQ ID NO: 12897
  source 1..3039: mol_type = unassigned DNA

SEQ ID NO: 15693-15694 - skipped (2 entries)

SEQ ID NO: 15695 - DNA, 36 bp, Homo sapiens; identical to SEQ ID NO: 12920
  source 1..36: mol_type = unassigned DNA

SEQ ID NO: 15696 - skipped

SEQ ID NO: 15697 - DNA, 181 bp, Homo sapiens; identical to SEQ ID NO: 12942
  source 1..181: mol_type = unassigned DNA

SEQ ID NO: 15698 - DNA, 369 bp, Homo sapiens; identical to SEQ ID NO: 12953
  source 1..369: mol_type = unassigned DNA

SEQ ID NO: 15699 - skipped

SEQ ID NO: 15700 - DNA, 35 bp, Homo sapiens; identical to SEQ ID NO: 12975
  source 1..35: mol_type = unassigned DNA

SEQ ID NO: 15701 - DNA, 487 bp, Homo sapiens; identical to SEQ ID NO: 12986
  source 1..487: mol_type = unassigned DNA

SEQ ID NO: 15702 - DNA, 28 bp, Homo sapiens
  source 1..28: mol_type = unassigned DNA
cggatcacgaggtcaggagatcaagacg

SEQ ID NO: 15703 - skipped

SEQ ID NO: 15704 - DNA, 18 bp, Homo sapiens
  source 1..18: mol_type = unassigned DNA
cgcggtcaggaaggcgcg

SEQ ID NO: 15705 - DNA, 18 bp, Homo sapiens
  source 1..18: mol_type = unassigned DNA
cgcactcactgacctgcg

SEQ ID NO: 15706 - DNA, 87 bp, Homo sapiens; identical to SEQ ID NO: 13031
  source 1..87: mol_type = unassigned DNA

SEQ ID NO: 15707 - DNA, 11 bp, Homo sapiens
  source 1..11: mol_type = unassigned DNA
cgcaagctccg

SEQ ID NO: 15708 - skipped

SEQ ID NO: 15709 - DNA, 167 bp, Homo sapiens; identical to SEQ ID NO: 13062
  source 1..167: mol_type = unassigned DNA

SEQ ID NO: 15710-15712 - skipped (3 entries)

SEQ ID NO: 15713 - DNA, 185 bp, Homo sapiens; identical to SEQ ID NO: 13066
  source 1..185: mol_type = unassigned DNA

SEQ ID NO: 15714 - DNA, 17 bp, Homo sapiens
  source 1..17: mol_type = unassigned DNA
cgccctgcttcggctcg

SEQ ID NO: 15715 - DNA, 135 bp, Homo sapiens; identical to SEQ ID NO: 13068
  source 1..135: mol_type = unassigned DNA

SEQ ID NO: 15716 - skipped

SEQ ID NO: 15717 - DNA, 71 bp, Homo sapiens; identical to SEQ ID NO: 13070
  source 1..71: mol_type = unassigned DNA

SEQ ID NO: 15718 - DNA, 54 bp, Homo sapiens; identical to SEQ ID NO: 13071
  source 1..54: mol_type = unassigned DNA

SEQ ID NO: 15719 - skipped

SEQ ID NO: 15720 - DNA, 29 bp, Homo sapiens
  source 1..29: mol_type = unassigned DNA
cgcttttcctacgggcttaaaaaccggcg

SEQ ID NO: 15721 - DNA, 18 bp, Homo sapiens
  source 1..18: mol_type = unassigned DNA
cgcagacactagaaagcg

SEQ ID NO: 15722-15723 - skipped (2 entries)

SEQ ID NO: 15724 - DNA, 24 bp, Homo sapiens
  source 1..24: mol_type = unassigned DNA
cgagtctgcgcaggaggcgcttcg

SEQ ID NO: 15725-15727 - skipped (3 entries)

SEQ ID NO: 15728 - DNA, 12 bp, Homo sapiens
  source 1..12: mol_type = unassigned DNA
cgacctgccccg

SEQ ID NO: 15729 - skipped

SEQ ID NO: 15730 - DNA, 80 bp, Homo sapiens; identical to SEQ ID NO: 13112
  source 1..80: mol_type = unassigned DNA

SEQ ID NO: 15731 - skipped

SEQ ID NO: 15732 - DNA, 3039 bp, Homo sapiens; identical to SEQ ID NO: 13134
  source 1..3039: mol_type = unassigned DNA

SEQ ID NO: 15733-15734 - skipped (2 entries)

SEQ ID NO: 15735 - DNA, 36 bp, synthetic construct; identical to SEQ ID NO: 13157
  misc_feature 1..36: note = Description of Artificial Sequence: Synthetic oligonucleotide
  source 1..36: mol_type = other DNA

SEQ ID NO: 15736 - skipped

SEQ ID NO: 15737 - DNA, 181 bp, synthetic construct; identical to SEQ ID NO: 13179
  misc_feature 1..181: note = Description of Artificial Sequence: Synthetic polynucleotide
  source 1..181: mol_type = other DNA

SEQ ID NO: 15738 - DNA, 369 bp, synthetic construct; identical to SEQ ID NO: 13190
  misc_feature 1..369: note = Description of Artificial Sequence: Synthetic polynucleotide
  source 1..369: mol_type = other DNA

SEQ ID NO: 15739 - skipped

SEQ ID NO: 15740 - DNA, 35 bp, synthetic construct; identical to SEQ ID NO: 13212
  misc_feature 1..35: note = Description of Artificial Sequence: Synthetic oligonucleotide
  source 1..35: mol_type = other DNA

SEQ ID NO: 15741 - DNA, 487 bp, synthetic construct; identical to SEQ ID NO: 13223
  misc_feature 1..487: note = Description of Artificial Sequence: Synthetic polynucleotide
  source 1..487: mol_type = other DNA

SEQ ID NO: 15742 - DNA, 28 bp, synthetic construct
  misc_feature 1..28: note = Description of Artificial Sequence: Synthetic oligonucleotide
  source 1..28: mol_type = other DNA
ygttttgattttttgatttygtgattyg

SEQ ID NO: 15743 - skipped

SEQ ID NO: 15744 - DNA, 18 bp, synthetic construct
  misc_feature 1..18: note = Description of Artificial Sequence: Synthetic oligonucleotide
  source 1..18: mol_type = other DNA
ygygtttttttgatygyg

SEQ ID NO: 15745 - DNA, 18 bp, synthetic construct
  misc_feature 1..18: note = Description of Artificial Sequence: Synthetic oligonucleotide
  source 1..18: mol_type = other DNA
ygtaggttagtgagtgyg

SEQ ID NO: 15746 - DNA, 87 bp, synthetic construct; identical to SEQ ID NO: 13268
  misc_feature 1..87: note = Description of Artificial Sequence: Synthetic oligonucleotide
  source 1..87: mol_type = other DNA

SEQ ID NO: 15747 - DNA, 11 bp, synthetic construct
  misc_feature 1..11: note = Description of Artificial Sequence: Synthetic oligonucleotide
  source 1..11: mol_type = other DNA
yggagtttgyg

SEQ ID NO: 15748 - skipped

SEQ ID NO: 15749 - DNA, 167 bp, synthetic construct; identical to SEQ ID NO: 13299
  misc_feature 1..167: note = Description of Artificial Sequence: Synthetic polynucleotide
  source 1..167: mol_type = other DNA

SEQ ID NO: 15750-15752 - skipped (3 entries)

SEQ ID NO: 15753 - DNA, 185 bp, synthetic construct; identical to SEQ ID NO: 13303
  misc_feature 1..185: note = Description of Artificial Sequence: Synthetic polynucleotide
  source 1..185: mol_type = other DNA

SEQ ID NO: 15754 - DNA, 17 bp, synthetic construct
  misc_feature 1..17: note = Description of Artificial Sequence: Synthetic oligonucleotide
  source 1..17: mol_type = other DNA
ygagtygaagtagggyg

SEQ ID NO: 15755 - DNA, 135 bp, synthetic construct; identical to SEQ ID NO: 13305
  misc_feature 1..135: note = Description of Artificial Sequence: Synthetic polynucleotide
  source 1..135: mol_type = other DNA

SEQ ID NO: 15756 - skipped

SEQ ID NO: 15757 - DNA, 71 bp, synthetic construct; identical to SEQ ID NO: 13307
  misc_feature 1..71: note = Description of Artificial Sequence: Synthetic oligonucleotide
  source 1..71: mol_type = other DNA

SEQ ID NO: 15758 - DNA, 54 bp, synthetic construct; identical to SEQ ID NO: 13308
  misc_feature 1..54: note = Description of Artificial Sequence: Synthetic oligonucleotide
  source 1..54: mol_type = other DNA

SEQ ID NO: 15759 - skipped

SEQ ID NO: 15760 - DNA, 29 bp, synthetic construct
  misc_feature 1..29: note = Description of Artificial Sequence: Synthetic oligonucleotide
  source 1..29: mol_type = other DNA
ygtyggtttttaagttygtaggaaaagyg

SEQ ID NO: 15761 - DNA, 18 bp, synthetic construct
  misc_feature 1..18: note = Description of Artificial Sequence: Synthetic oligonucleotide
  source 1..18: mol_type = other DNA
ygttttttagtgtttgyg

SEQ ID NO: 15762-15763 - skipped (2 entries)

SEQ ID NO: 15764 - DNA, 24 bp, synthetic construct
  misc_feature 1..24: note = Description of Artificial Sequence: Synthetic oligonucleotide
  source 1..24: mol_type = other DNA
ygaagygttttttgygtagattyg

SEQ ID NO: 15765-15767 - skipped (3 entries)

SEQ ID NO: 15768 - DNA, 12 bp, synthetic construct
  misc_feature 1..12: note = Description of Artificial Sequence: Synthetic oligonucleotide
  source 1..12: mol_type = other DNA
yggggtaggtyg

SEQ ID NO: 15769 - skipped

SEQ ID NO: 15770 - DNA, 80 bp, synthetic construct; identical to SEQ ID NO: 13349
  misc_feature 1..80: note = Description of Artificial Sequence: Synthetic oligonucleotide
  source 1..80: mol_type = other DNA

SEQ ID NO: 15771 - skipped

SEQ ID NO: 15772 - DNA, 3039 bp, synthetic construct; identical to SEQ ID NO: 13371
  misc_feature 1..3039: note = Description of Artificial Sequence: Synthetic polynucleotide
  source 1..3039: mol_type = other DNA

SEQ ID NO: 15773-15774 - skipped (2 entries)

SEQ ID NO: 15775 - DNA, 36 bp, synthetic construct; identical to SEQ ID NO: 13394
  misc_feature 1..36: note = Description of Artificial Sequence: Synthetic oligonucleotide
  source 1..36: mol_type = other DNA

SEQ ID NO: 15776 - skipped

SEQ ID NO: 15777 - DNA, 181 bp, synthetic construct; identical to SEQ ID NO: 13416
  misc_feature 1..181: note = Description of Artificial Sequence: Synthetic polynucleotide
  source 1..181: mol_type = other DNA

SEQ ID NO: 15778 - DNA, 369 bp, synthetic construct; identical to SEQ ID NO: 13427
  misc_feature 1..369: note = Description of Artificial Sequence: Synthetic polynucleotide
  source 1..369: mol_type = other DNA

SEQ ID NO: 15779 - skipped

SEQ ID NO: 15780 - DNA, 35 bp, synthetic construct; identical to SEQ ID NO: 13449
  misc_feature 1..35: note = Description of Artificial Sequence: Synthetic oligonucleotide
  source 1..35: mol_type = other DNA

SEQ ID NO: 15781 - DNA, 487 bp, synthetic construct; identical to SEQ ID NO: 13460
  misc_feature 1..487: note = Description of Artificial Sequence: Synthetic polynucleotide
  source 1..487: mol_type = other DNA

SEQ ID NO: 15782 - DNA, 28 bp, synthetic construct
  misc_feature 1..28: note = Description of Artificial Sequence: Synthetic oligonucleotide
  source 1..28: mol_type = other DNA
tgttttgattttttgattttgtgatttg

SEQ ID NO: 15783 - skipped

SEQ ID NO: 15784 - DNA, 18 bp, synthetic construct
  misc_feature 1..18: note = Description of Artificial Sequence: Synthetic oligonucleotide
  source 1..18: mol_type = other DNA
tgtgtttttttgattgtg

SEQ ID NO: 15785 - DNA, 18 bp, synthetic construct
  misc_feature 1..18: note = Description of Artificial Sequence: Synthetic oligonucleotide
  source 1..18: mol_type = other DNA
tgtaggttagtgagtgtg

SEQ ID NO: 15786 - DNA, 87 bp, synthetic construct; identical to SEQ ID NO: 13505
  misc_feature 1..87: note = Description of Artificial Sequence: Synthetic oligonucleotide
  source 1..87: mol_type = other DNA

SEQ ID NO: 15787 - DNA, 11 bp, synthetic construct
  misc_feature 1..11: note = Description of Artificial Sequence: Synthetic oligonucleotide
  source 1..11: mol_type = other DNA
tggagtttgtg

SEQ ID NO: 15788 - skipped

SEQ ID NO: 15789 - DNA, 167 bp, synthetic construct; identical to SEQ ID NO: 13536
  misc_feature 1..167: note = Description of Artificial Sequence: Synthetic polynucleotide
  source 1..167: mol_type = other DNA

SEQ ID NO: 15790-15792 - skipped (3 entries)

SEQ ID NO: 15793 - DNA, 185 bp, synthetic construct; identical to SEQ ID NO: 13540
  misc_feature 1..185: note = Description of Artificial Sequence: Synthetic polynucleotide
  source 1..185: mol_type = other DNA

SEQ ID NO: 15794 - DNA, 17 bp, synthetic construct
  misc_feature 1..17: note = Description of Artificial Sequence: Synthetic oligonucleotide
  source 1..17: mol_type = other DNA
tgagttgaagtagggtg

SEQ ID NO: 15795 - DNA, 135 bp, synthetic construct; identical to SEQ ID NO: 13542
  misc_feature 1..135: note = Description of Artificial Sequence: Synthetic polynucleotide
  source 1..135: mol_type = other DNA

SEQ ID NO: 15796 - skipped

SEQ ID NO: 15797 - DNA, 71 bp, synthetic construct; identical to SEQ ID NO: 13544
  misc_feature 1..71: note = Description of Artificial Sequence: Synthetic oligonucleotide
  source 1..71: mol_type = other DNA

SEQ ID NO: 15798 - DNA, 54 bp, synthetic construct; identical to SEQ ID NO: 13545
  misc_feature 1..54: note = Description of Artificial Sequence: Synthetic oligonucleotide
  source 1..54: mol_type = other DNA

SEQ ID NO: 15799 - skipped

SEQ ID NO: 15800 - DNA, 29 bp, synthetic construct
  misc_feature 1..29: note = Description of Artificial Sequence: Synthetic oligonucleotide
  source 1..29: mol_type = other DNA
tgttggtttttaagtttgtaggaaaagtg

SEQ ID NO: 15801 - DNA, 18 bp, synthetic construct
  misc_feature 1..18: note = Description of Artificial Sequence: Synthetic oligonucleotide
  source 1..18: mol_type = other DNA
tgttttttagtgtttgtg

SEQ ID NO: 15802-15803 - skipped (2 entries)

SEQ ID NO: 15804 - DNA, 24 bp, synthetic construct
  misc_feature 1..24: note = Description of Artificial Sequence: Synthetic oligonucleotide
  source 1..24: mol_type = other DNA
tgaagtgttttttgtgtagatttg

SEQ ID NO: 15805-15807 - skipped (3 entries)

SEQ ID NO: 15808 - DNA, 12 bp, synthetic construct
  misc_feature 1..12: note = Description of Artificial Sequence: Synthetic oligonucleotide
  source 1..12: mol_type = other DNA
tggggtaggttg

SEQ ID NO: 15809 - skipped

SEQ ID NO: 15810 - DNA, 80 bp, synthetic construct; identical to SEQ ID NO: 13586
  misc_feature 1..80: note = Description of Artificial Sequence: Synthetic oligonucleotide
  source 1..80: mol_type = other DNA

SEQ ID NO: 15811 - skipped

SEQ ID NO: 15812 - DNA, 3039 bp, synthetic construct; identical to SEQ ID NO: 13608
  misc_feature 1..3039: note = Description of Artificial Sequence: Synthetic polynucleotide
  source 1..3039: mol_type = other DNA

SEQ ID NO: 15813-15814 - skipped (2 entries)

SEQ ID NO: 15815 - DNA, 36 bp, synthetic construct; identical to SEQ ID NO: 13631
  misc_feature 1..36: note = Description of Artificial Sequence: Synthetic oligonucleotide
  source 1..36: mol_type = other DNA

SEQ ID NO: 15816 - skipped

SEQ ID NO: 15817 - DNA, 181 bp, synthetic construct; identical to SEQ ID NO: 13653
  misc_feature 1..181: note = Description of Artificial Sequence: Synthetic polynucleotide
  source 1..181: mol_type = other DNA

SEQ ID NO: 15818 - DNA, 369 bp, synthetic construct; identical to SEQ ID NO: 13664
  misc_feature 1..369: note = Description of Artificial Sequence: Synthetic polynucleotide
  source 1..369: mol_type = other DNA

SEQ ID NO: 15819 - skipped

SEQ ID NO: 15820 - DNA, 35 bp, synthetic construct; identical to SEQ ID NO: 13686
  misc_feature 1..35: note = Description of Artificial Sequence: Synthetic oligonucleotide
  source 1..35: mol_type = other DNA

SEQ ID NO: 15821 - DNA, 487 bp, synthetic construct; identical to SEQ ID NO: 13697
  misc_feature 1..487: note = Description of Artificial Sequence: Synthetic polynucleotide
  source 1..487: mol_type = other DNA

SEQ ID NO: 15822 - DNA, 28 bp, synthetic construct
  misc_feature 1..28: note = Description of Artificial Sequence: Synthetic oligonucleotide
  source 1..28: mol_type = other DNA
yggattaygaggttaggagattaagayg

SEQ ID NO: 15823 - skipped

SEQ ID NO: 15824 - DNA, 18 bp, synthetic construct
  misc_feature 1..18: note = Description of Artificial Sequence: Synthetic oligonucleotide
  source 1..18: mol_type = other DNA
ygyggttaggaaggygyg

SEQ ID NO: 15825 - DNA, 18 bp, synthetic construct
  misc_feature 1..18: note = Description of Artificial Sequence: Synthetic oligonucleotide
  source 1..18: mol_type = other DNA
ygtatttattgatttgyg

SEQ ID NO: 15826 - DNA, 87 bp, synthetic construct; identical to SEQ ID NO: 13742
  misc_feature 1..87: note = Description of Artificial Sequence: Synthetic oligonucleotide
  source 1..87: mol_type = other DNA

SEQ ID NO: 15827 - DNA, 11 bp, synthetic construct
  misc_feature 1..11: note = Description of Artificial Sequence: Synthetic oligonucleotide
  source 1..11: mol_type = other DNA
ygtaagtttyg

SEQ ID NO: 15828 - skipped

SEQ ID NO: 15829 - DNA, 167 bp, synthetic construct; identical to SEQ ID NO: 13773
  misc_feature 1..167: note = Description of Artificial Sequence: Synthetic polynucleotide
  source 1..167: mol_type = other DNA

SEQ ID NO: 15830-15832 - skipped (3 entries)

SEQ ID NO: 15833 - DNA, 185 bp, synthetic construct; identical to SEQ ID NO: 13777
  misc_feature 1..185: note = Description of Artificial Sequence: Synthetic polynucleotide
  source 1..185: mol_type = other DNA

SEQ ID NO: 15834 - DNA, 17 bp, synthetic construct
  misc_feature 1..17: note = Description of Artificial Sequence: Synthetic oligonucleotide
  source 1..17: mol_type = other DNA
ygttttgtttyggttyg

SEQ ID NO: 15835 - DNA, 135 bp, synthetic construct; identical to SEQ ID NO: 13779
  misc_feature 1..135: note = Description of Artificial Sequence: Synthetic polynucleotide
  source 1..135: mol_type = other DNA

SEQ ID NO: 15836 - skipped

SEQ ID NO: 15837 - DNA, 71 bp, synthetic construct; identical to SEQ ID NO: 13781
  misc_feature 1..71: note = Description of Artificial Sequence: Synthetic oligonucleotide
  source 1..71: mol_type = other DNA

SEQ ID NO: 15838 - DNA, 54 bp, synthetic construct; identical to SEQ ID NO: 13782
  misc_feature 1..54: note = Description of Artificial Sequence: Synthetic oligonucleotide
  source 1..54: mol_type = other DNA

SEQ ID NO: 15839 - skipped

SEQ ID NO: 15840 - DNA, 29 bp, synthetic construct
  misc_feature 1..29: note = Description of Artificial Sequence: Synthetic oligonucleotide
  source 1..29: mol_type = other DNA
ygttttttttaygggtttaaaaatyggyg

SEQ ID NO: 15841 - DNA, 18 bp, synthetic construct
  misc_feature 1..18: note = Description of Artificial Sequence: Synthetic oligonucleotide
  source 1..18: mol_type = other DNA
ygtagatattagaaagyg

SEQ ID NO: 15842-15843 - skipped (2 entries)

SEQ ID NO: 15844 - DNA, 24 bp, synthetic construct
  misc_feature 1..24: note = Description of Artificial Sequence: Synthetic oligonucleotide
  source 1..24: mol_type = other DNA
ygagtttgygtaggaggygtttyg

SEQ ID NO: 15845-15847 - skipped (3 entries)

SEQ ID NO: 15848 - DNA, 12 bp, synthetic construct
  misc_feature 1..12: note = Description of Artificial Sequence: Synthetic oligonucleotide
  source 1..12: mol_type = other DNA
ygatttgtttyg

SEQ ID NO: 15849 - skipped

SEQ ID NO: 15850 - DNA, 80 bp, synthetic construct; identical to SEQ ID NO: 13823
  misc_feature 1..80: note = Description of Artificial Sequence: Synthetic oligonucleotide
  source 1..80: mol_type = other DNA

SEQ ID NO: 15851 - skipped

SEQ ID NO: 15852 - DNA, 3039 bp, synthetic construct; identical to SEQ ID NO: 13845
  misc_feature 1..3039: note = Description of Artificial Sequence: Synthetic polynucleotide
  source 1..3039: mol_type = other DNA

SEQ ID NO: 15853-15854 - skipped (2 entries)

SEQ ID NO: 15855 - DNA, 36 bp, synthetic construct; identical to SEQ ID NO: 13868
  misc_feature 1..36: note = Description of Artificial Sequence: Synthetic oligonucleotide
  source 1..36: mol_type = other DNA

SEQ ID NO: 15856 - skipped

SEQ ID NO: 15857 - DNA, 181 bp, synthetic construct; identical to SEQ ID NO: 13890
  misc_feature 1..181: note = Description of Artificial Sequence: Synthetic polynucleotide
  source 1..181: mol_type = other DNA

SEQ ID NO: 15858 - DNA, 369 bp, synthetic construct; identical to SEQ ID NO: 13901
  misc_feature 1..369: note = Description of Artificial Sequence: Synthetic polynucleotide
  source 1..369: mol_type = other DNA

SEQ ID NO: 15859 - skipped

SEQ ID NO: 15860 - DNA, 35 bp, synthetic construct; identical to SEQ ID NO: 13923
  misc_feature 1..35: note = Description of Artificial Sequence: Synthetic oligonucleotide
  source 1..35: mol_type = other DNA

SEQ ID NO: 15861 - DNA, 487 bp, synthetic construct; identical to SEQ ID NO: 13934
  misc_feature 1..487: note = Description of Artificial Sequence: Synthetic polynucleotide
  source 1..487: mol_type = other DNA

SEQ ID NO: 15862 - DNA, 28 bp, synthetic construct
  misc_feature 1..28: note = Description of Artificial Sequence: Synthetic oligonucleotide
  source 1..28: mol_type = other DNA
tggattatgaggttaggagattaagatg

SEQ ID NO: 15863 - skipped

SEQ ID NO: 15864 - DNA, 18 bp, synthetic construct
  misc_feature 1..18: note = Description of Artificial Sequence: Synthetic oligonucleotide
  source 1..18: mol_type = other DNA
tgtggttaggaaggtgtg

SEQ ID NO: 15865 - DNA, 18 bp, synthetic construct
  misc_feature 1..18: note = Description of Artificial Sequence: Synthetic oligonucleotide
  source 1..18: mol_type = other DNA
tgtatttattgatttgtg

SEQ ID NO: 15866 - DNA, 87 bp, synthetic construct; identical to SEQ ID NO: 13979
  misc_feature 1..87: note = Description of Artificial Sequence: Synthetic oligonucleotide
  source 1..87: mol_type = other DNA

SEQ ID NO: 15867 - DNA, 11 bp, synthetic construct
  misc_feature 1..11: note = Description of Artificial Sequence: Synthetic oligonucleotide
  source 1..11: mol_type = other DNA
tgtaagttttg

SEQ ID NO: 15868 - skipped

SEQ ID NO: 15869 - DNA, 167 bp, synthetic construct; identical to SEQ ID NO: 14010
  misc_feature 1..167: note = Description of Artificial Sequence: Synthetic polynucleotide
  source 1..167: mol_type = other DNA

SEQ ID NO: 15870-15872 - skipped (3 entries)

SEQ ID NO: 15873 - DNA, 185 bp, synthetic construct; identical to SEQ ID NO: 14014
  misc_feature 1..185: note = Description of Artificial Sequence: Synthetic polynucleotide
  source 1..185: mol_type = other DNA

SEQ ID NO: 15874 - DNA, 17 bp, synthetic construct
  misc_feature 1..17: note = Description of Artificial Sequence: Synthetic oligonucleotide
  source 1..17: mol_type = other DNA
tgttttgttttggtttg

SEQ ID NO: 15875 - DNA, 135 bp, synthetic construct; identical to SEQ ID NO: 14016
  misc_feature 1..135: note = Description of Artificial Sequence: Synthetic polynucleotide
  source 1..135: mol_type = other DNA

SEQ ID NO: 15876 - skipped

SEQ ID NO: 15877 - DNA, 71 bp, synthetic construct; identical to SEQ ID NO: 14018
  misc_feature 1..71: note = Description of Artificial Sequence: Synthetic oligonucleotide
  source 1..71: mol_type = other DNA

SEQ ID NO: 15878 - DNA, 54 bp, synthetic construct; identical to SEQ ID NO: 14019
  misc_feature 1..54: note = Description of Artificial Sequence: Synthetic oligonucleotide
  source 1..54: mol_type = other DNA

SEQ ID NO: 15879 - skipped

SEQ ID NO: 15880 - DNA, 29 bp, synthetic construct
  misc_feature 1..29: note = Description of Artificial Sequence: Synthetic oligonucleotide
  source 1..29: mol_type = other DNA
tgttttttttatgggtttaaaaattggtg

SEQ ID NO: 15881 - DNA, 18 bp, synthetic construct
  misc_feature 1..18: note = Description of Artificial Sequence: Synthetic oligonucleotide
  source 1..18: mol_type = other DNA
tgtagatattagaaagtg

SEQ ID NO: 15882-15883 - skipped (2 entries)

SEQ ID NO: 15884 - DNA, 24 bp, synthetic construct
  misc_feature 1..24: note = Description of Artificial Sequence: Synthetic oligonucleotide
  source 1..24: mol_type = other DNA
tgagtttgtgtaggaggtgttttg

SEQ ID NO: 15885-15887 - skipped (3 entries)

SEQ ID NO: 15888 - DNA, 12 bp, synthetic construct
  misc_feature 1..12: note = Description of Artificial Sequence: Synthetic oligonucleotide
  source 1..12: mol_type = other DNA
tgatttgttttg

SEQ ID NO: 15889 - skipped

SEQ ID NO: 15890 - DNA, 80 bp, synthetic construct; identical to SEQ ID NO: 14060
  misc_feature 1..80: note = Description of Artificial Sequence: Synthetic oligonucleotide
  source 1..80: mol_type = other DNA

SEQ ID NO: 15891 - skipped

SEQ ID NO: 15892 - DNA, 3039 bp, synthetic construct; identical to SEQ ID NO: 14082
  misc_feature 1..3039: note = Description of Artificial Sequence: Synthetic polynucleotide
  source 1..3039: mol_type = other DNA

SEQ ID NO: 15893 - DNA, 201 bp, Homo sapiens; identical to SEQ ID NO: 14093
  source 1..201: mol_type = unassigned DNA

SEQ ID NO: 15894 - DNA, 208 bp, Homo sapiens; identical to SEQ ID NO: 14094
  source 1..208: mol_type = unassigned DNA

SEQ ID NO: 15895 - DNA, 235 bp, Homo sapiens; identical to SEQ ID NO: 14105
  source 1..235: mol_type = unassigned DNA

SEQ ID NO: 15896 - DNA, 207 bp, Homo sapiens; identical to SEQ ID NO: 14116
  source 1..207: mol_type = unassigned DNA

SEQ ID NO: 15897 - DNA, 380 bp, Homo sapiens; identical to SEQ ID NO: 14127
  source 1..380: mol_type = unassigned DNA

SEQ ID NO: 15898 - DNA, 568 bp, Homo sapiens; identical to SEQ ID NO: 14138
  source 1..568: mol_type = unassigned DNA

SEQ ID NO: 15899 - DNA, 201 bp, Homo sapiens; identical to SEQ ID NO: 14149
  source 1..201: mol_type = unassigned DNA

SEQ ID NO: 15900 - DNA, 234 bp, Homo sapiens; identical to SEQ ID NO: 14160
  source 1..234: mol_type = unassigned DNA

SEQ ID NO: 15901 - DNA, 686 bp, Homo sapiens; identical to SEQ ID NO: 14171
  source 1..686: mol_type = unassigned DNA

SEQ ID NO: 15902 - DNA, 227 bp, Homo sapiens; identical to SEQ ID NO: 14182
  source 1..227: mol_type = unassigned DNA

SEQ ID NO: 15903 - DNA, 201 bp, Homo sapiens; identical to SEQ ID NO: 14193
  source 1..201: mol_type = unassigned DNA

SEQ ID NO: 15904 - DNA, 217 bp, Homo sapiens; identical to SEQ ID NO: 14204
  source 1..217: mol_type = unassigned DNA

SEQ ID NO: 15905 - DNA, 217 bp, Homo sapiens; identical to SEQ ID NO: 14205
  source 1..217: mol_type = unassigned DNA

SEQ ID NO: 15906 - DNA, 286 bp, Homo sapiens; identical to SEQ ID NO: 14216
  source 1..286: mol_type = unassigned DNA

SEQ ID NO: 15907 - DNA, 210 bp, Homo sapiens; identical to SEQ ID NO: 14227
  source 1..210: mol_type = unassigned DNA

SEQ ID NO: 15908 - DNA, 201 bp, Homo sapiens; identical to SEQ ID NO: 14238
  source 1..201: mol_type = unassigned DNA

SEQ ID NO: 15909 - DNA, 366 bp, Homo sapiens; identical to SEQ ID NO: 14247
  source 1..366: mol_type = unassigned DNA

SEQ ID NO: 15910 - DNA, 201 bp, Homo sapiens; identical to SEQ ID NO: 14248
  source 1..201: mol_type = unassigned DNA

SEQ ID NO: 15911 - DNA, 201 bp, Homo sapiens; identical to SEQ ID NO: 14249
  source 1..201: mol_type = unassigned DNA

SEQ ID NO: 15912 - DNA, 201 bp, Homo sapiens; identical to SEQ ID NO: 14250
  source 1..201: mol_type = unassigned DNA

SEQ ID NO: 15913 - DNA, 384 bp, Homo sapiens; identical to SEQ ID NO: 14251
  source 1..384: mol_type = unassigned DNA

SEQ ID NO: 15914 - DNA, 216 bp, Homo sapiens; identical to SEQ ID NO: 14252
  source 1..216: mol_type = unassigned DNA

SEQ ID NO: 15915 - DNA, 334 bp, Homo sapiens; identical to SEQ ID NO: 14253
  source 1..334: mol_type = unassigned DNA

SEQ ID NO: 15916 - DNA, 201 bp, Homo sapiens; identical to SEQ ID NO: 14254
  source 1..201: mol_type = unassigned DNA

SEQ ID NO: 15917 - DNA, 270 bp, Homo sapiens; identical to SEQ ID NO: 14255
  source 1..270: mol_type = unassigned DNA

SEQ ID NO: 15918 - DNA, 253 bp, Homo sapiens; identical to SEQ ID NO: 14256
  source 1..253: mol_type = unassigned DNA

SEQ ID NO: 15919 - DNA, 204 bp, Homo sapiens; identical to SEQ ID NO: 14257
  source 1..204: mol_type = unassigned DNA

SEQ ID NO: 15920 - DNA, 228 bp, Homo sapiens; identical to SEQ ID NO: 14258
  source 1..228: mol_type = unassigned DNA

SEQ ID NO: 15921 - DNA, 217 bp, Homo sapiens; identical to SEQ ID NO: 14259
  source 1..217: mol_type = unassigned DNA

SEQ ID NO: 15922 - DNA, 201 bp, Homo sapiens; identical to SEQ ID NO: 14260
  source 1..201: mol_type = unassigned DNA

SEQ ID NO: 15923 - DNA, 204 bp, Homo sapiens; identical to SEQ ID NO: 14261
  source 1..204: mol_type = unassigned DNA

SEQ ID NO: 15924 - DNA, 223 bp, Homo sapiens; identical to SEQ ID NO: 14262
  source 1..223: mol_type = unassigned DNA

SEQ ID NO: 15925 - DNA, 201 bp, Homo sapiens; identical to SEQ ID NO: 14263
  source 1..201: mol_type = unassigned DNA

SEQ ID NO: 15926 - DNA, 203 bp, Homo sapiens; identical to SEQ ID NO: 14264
  source 1..203: mol_type = unassigned DNA

SEQ ID NO: 15927 - DNA, 201 bp, Homo sapiens; identical to SEQ ID NO: 14265
  source 1..201: mol_type = unassigned DNA

SEQ ID NO: 15928 - DNA, 211 bp, Homo sapiens; identical to SEQ ID NO: 14275
  source 1..211: mol_type = unassigned DNA

SEQ ID NO: 15929 - DNA, 201 bp, Homo sapiens; identical to SEQ ID NO: 14286
  source 1..201: mol_type = unassigned DNA

SEQ ID NO: 15930 - DNA, 279 bp, Homo sapiens; identical to SEQ ID NO: 14297
  source 1..279: mol_type = unassigned DNA

SEQ ID NO: 15931 - DNA, 203 bp, Homo sapiens; identical to SEQ ID NO: 14308
  source 1..203: mol_type = unassigned DNA

SEQ ID NO: 15932 - DNA, 3238 bp, Homo sapiens; identical to SEQ ID NO: 14319
  source 1..3238: mol_type = unassigned DNA

SEQ ID NO: 15933 - DNA, 201 bp, Homo sapiens; identical to SEQ ID NO: 14330
  source 1..201: mol_type = unassigned DNA

SEQ ID NO: 15934 - DNA, 208 bp, Homo sapiens; identical to SEQ ID NO: 14331
  source 1..208: mol_type = unassigned DNA

SEQ ID NO: 15935 - DNA, 235 bp, Homo sapiens; identical to SEQ ID NO: 14342
  source 1..235: mol_type = unassigned DNA

SEQ ID NO: 15936 - DNA, 207 bp, Homo sapiens; identical to SEQ ID NO: 14353
  source 1..207: mol_type = unassigned DNA

SEQ ID NO: 15937 - DNA, 380 bp, Homo sapiens; identical to SEQ ID NO: 14364
  source 1..380: mol_type = unassigned DNA

SEQ ID NO: 15938 - DNA, 568 bp, Homo sapiens; identical to SEQ ID NO: 14375
  source 1..568: mol_type = unassigned DNA

SEQ ID NO: 15939 - DNA, 201 bp, Homo sapiens; identical to SEQ ID NO: 14386
  source 1..201: mol_type = unassigned DNA

SEQ ID NO: 15940 - DNA, 234 bp, Homo sapiens; identical to SEQ ID NO: 14397
  source 1..234: mol_type = unassigned DNA

SEQ ID NO: 15941 - DNA, 686 bp, Homo sapiens; identical to SEQ ID NO: 14408
  source 1..686: mol_type = unassigned DNA

SEQ ID NO: 15942 - DNA, 227 bp, Homo sapiens; identical to SEQ ID NO: 14419
  source 1..227: mol_type = unassigned DNA

SEQ ID NO: 15943 - DNA, 201 bp, Homo sapiens; identical to SEQ ID NO: 14430
  source 1..201: mol_type = unassigned DNA

SEQ ID NO: 15944 - DNA, 217 bp, Homo sapiens; identical to SEQ ID NO: 14441
  source 1..217: mol_type = unassigned DNA

SEQ ID NO: 15945 - DNA, 217 bp, Homo sapiens; identical to SEQ ID NO: 14442
  source 1..217: mol_type = unassigned DNA

SEQ ID NO: 15946 - DNA, 286 bp, Homo sapiens; identical to SEQ ID NO: 14453
  source 1..286: mol_type = unassigned DNA

SEQ ID NO: 15947 - DNA, 210 bp, Homo sapiens; identical to SEQ ID NO: 14464
  source 1..210: mol_type = unassigned DNA

SEQ ID NO: 15948 - DNA, 201 bp, Homo sapiens; identical to SEQ ID NO: 14475
  source 1..201: mol_type = unassigned DNA

SEQ ID NO: 15949 - DNA, 366 bp, Homo sapiens; identical to SEQ ID NO: 14484
  source 1..366: mol_type = unassigned DNA

SEQ ID NO: 15950 - DNA, 201 bp, Homo sapiens; identical to SEQ ID NO: 14485
  source 1..201: mol_type = unassigned DNA

SEQ ID NO: 15951 - DNA, 201 bp, Homo sapiens; identical to SEQ ID NO: 14486
  source 1..201: mol_type = unassigned DNA

SEQ ID NO: 15952 - DNA, 201 bp, Homo sapiens; identical to SEQ ID NO: 14487
  source 1..201: mol_type = unassigned DNA

SEQ ID NO: 15953 - DNA, 384 bp, Homo sapiens; identical to SEQ ID NO: 14488
  source 1..384: mol_type = unassigned DNA

SEQ ID NO: 15954 - DNA, 216 bp, Homo sapiens; identical to SEQ ID NO: 14489
  source 1..216: mol_type = unassigned DNA

SEQ ID NO: 15955 - DNA, 334 bp, Homo sapiens; identical to SEQ ID NO: 14490
  source 1..334: mol_type = unassigned DNA

SEQ ID NO: 15956 - DNA, 201 bp, Homo sapiens; identical to SEQ ID NO: 14491
  source 1..201: mol_type = unassigned DNA

SEQ ID NO: 15957 - DNA, 270 bp, Homo sapiens; identical to SEQ ID NO: 14492
  source 1..270: mol_type = unassigned DNA

SEQ ID NO: 15958 - DNA, 253 bp, Homo sapiens; identical to SEQ ID NO: 14493
  source 1..253: mol_type = unassigned DNA

SEQ ID NO: 15959 - DNA, 204 bp, Homo sapiens; identical to SEQ ID NO: 14494
  source 1..204: mol_type = unassigned DNA

SEQ ID NO: 15960 - DNA, 228 bp, Homo sapiens; identical to SEQ ID NO: 14495
  source 1..228: mol_type = unassigned DNA

SEQ ID NO: 15961 - DNA, 217 bp, Homo sapiens; identical to SEQ ID NO: 14496
  source 1..217: mol_type = unassigned DNA

SEQ ID NO: 15962 - DNA, 201 bp, Homo sapiens; identical to SEQ ID NO: 14497
  source 1..201: mol_type = unassigned DNA

SEQ ID NO: 15963 - DNA, 204 bp, Homo sapiens; identical to SEQ ID NO: 14498
  source 1..204: mol_type = unassigned DNA

SEQ ID NO: 15964 - DNA, 223 bp, Homo sapiens; identical to SEQ ID NO: 14499
  source 1..223: mol_type = unassigned DNA

SEQ ID NO: 15965 - DNA, 201 bp, Homo sapiens; identical to SEQ ID NO: 14500
  source 1..201: mol_type = unassigned DNA

SEQ ID NO: 15966 - DNA, 203 bp, Homo sapiens; identical to SEQ ID NO: 14501
  source 1..203: mol_type = unassigned DNA

SEQ ID NO: 15967 - DNA, 201 bp, Homo sapiens; identical to SEQ ID NO: 14502
  source 1..201: mol_type = unassigned DNA

SEQ ID NO: 15968 - DNA, 211 bp, Homo sapiens; identical to SEQ ID NO: 14512
  source 1..211: mol_type = unassigned DNA

SEQ ID NO: 15969 - DNA, 201 bp, Homo sapiens; identical to SEQ ID NO: 14523
  source 1..201: mol_type = unassigned DNA

SEQ ID NO: 15970 - DNA, 279 bp, Homo sapiens; identical to SEQ ID NO: 14534
  source 1..279: mol_type = unassigned DNA

SEQ ID NO: 15971 - DNA, 203 bp, Homo sapiens; identical to SEQ ID NO: 14545
  source 1..203: mol_type = unassigned DNA

SEQ ID NO: 15972 - DNA, 3238 bp, Homo sapiens; identical to SEQ ID NO: 14556
  source 1..3238: mol_type = unassigned DNA

SEQ ID NO: 15973 - DNA, 201 bp, synthetic construct; identical to SEQ ID NO: 14567
  misc_feature 1..201: note = Description of Artificial Sequence: Synthetic polynucleotide
  source 1..201: mol_type = other DNA

SEQ ID NO: 15974 - DNA, 208 bp, synthetic construct; identical to SEQ ID NO: 14568
  misc_feature 1..208: note = Description of Artificial Sequence: Synthetic polynucleotide
  source 1..208: mol_type = other DNA

SEQ ID NO: 15975 - DNA, 235 bp, synthetic construct; identical to SEQ ID NO: 14579
  misc_feature 1..235: note = Description of Artificial Sequence: Synthetic polynucleotide
  source 1..235: mol_type = other DNA

SEQ ID NO: 15976 - DNA, 207 bp, synthetic construct; identical to SEQ ID NO: 14590
  misc_feature 1..207: note = Description of Artificial Sequence: Synthetic polynucleotide
  source 1..207: mol_type = other DNA

SEQ ID NO: 15977 - DNA, 380 bp, synthetic construct; identical to SEQ ID NO: 14601
  misc_feature 1..380: note = Description of Artificial Sequence: Synthetic polynucleotide
  source 1..380: mol_type = other DNA

SEQ ID NO: 15978 - DNA, 568 bp, synthetic construct; identical to SEQ ID NO: 14612
  misc_feature 1..568: note = Description of Artificial Sequence: Synthetic polynucleotide
  source 1..568: mol_type = other DNA

SEQ ID NO: 15979 - DNA, 201 bp, synthetic construct; identical to SEQ ID NO: 14623
  misc_feature 1..201: note = Description of Artificial Sequence: Synthetic polynucleotide
  source 1..201: mol_type = other DNA

SEQ ID NO: 15980 - DNA, 234 bp, synthetic construct; identical to SEQ ID NO: 14634
  misc_feature 1..234: note = Description of Artificial Sequence: Synthetic polynucleotide
  source 1..234: mol_type = other DNA

SEQ ID NO: 15981 - DNA, 686 bp, synthetic construct; identical to SEQ ID NO: 14645
  misc_feature 1..686: note = Description of Artificial Sequence: Synthetic polynucleotide
  source 1..686: mol_type = other DNA

SEQ ID NO: 15982 - DNA, 227 bp, synthetic construct; identical to SEQ ID NO: 14656
  misc_feature 1..227: note = Description of Artificial Sequence: Synthetic polynucleotide
  source 1..227: mol_type = other DNA

SEQ ID NO: 15983 - DNA, 201 bp, synthetic construct; identical to SEQ ID NO: 14667
  misc_feature 1..201: note = Description of Artificial Sequence: Synthetic polynucleotide
  source 1..201: mol_type = other DNA

SEQ ID NO: 15984 - DNA, 217 bp, synthetic construct; identical to SEQ ID NO: 14678
  misc_feature 1..217: note = Description of Artificial Sequence: Synthetic polynucleotide
  source 1..217: mol_type = other DNA

SEQ ID NO: 15985 - DNA, 217 bp, synthetic construct; identical to SEQ ID NO: 14679
  misc_feature 1..217: note = Description of Artificial Sequence: Synthetic polynucleotide
  source 1..217: mol_type = other DNA

SEQ ID NO: 15986 - DNA, 286 bp, synthetic construct; identical to SEQ ID NO: 14690
  misc_feature 1..286: note = Description of Artificial Sequence: Synthetic polynucleotide
  source 1..286: mol_type = other DNA

SEQ ID NO: 15987 - DNA, 210 bp, synthetic construct; identical to SEQ ID NO: 14701
  misc_feature 1..210: note = Description of Artificial Sequence: Synthetic polynucleotide
  source 1..210: mol_type = other DNA

SEQ ID NO: 15988 - DNA, 201 bp, synthetic construct; identical to SEQ ID NO: 14712
  misc_feature 1..201: note = Description of Artificial Sequence: Synthetic polynucleotide
  source 1..201: mol_type = other DNA

SEQ ID NO: 15989 - DNA, 366 bp, synthetic construct; identical to SEQ ID NO: 14721
  misc_feature 1..366: note = Description of Artificial Sequence: Synthetic polynucleotide
  source 1..366: mol_type = other DNA

SEQ ID NO: 15990 - DNA, 201 bp, synthetic construct; identical to SEQ ID NO: 14722
  misc_feature 1..201: note = Description of Artificial Sequence: Synthetic polynucleotide
  source 1..201: mol_type = other DNA

SEQ ID NO: 15991 - DNA, 201 bp, synthetic construct; identical to SEQ ID NO: 14723
  misc_feature 1..201: note = Description of Artificial Sequence: Synthetic polynucleotide
  source 1..201: mol_type = other DNA

SEQ ID NO: 15992 - DNA, 201 bp, synthetic construct; identical to SEQ ID NO: 14724
  misc_feature 1..201: note = Description of Artificial Sequence: Synthetic polynucleotide
  source 1..201: mol_type = other DNA

SEQ ID NO: 15993 - DNA, 384 bp, synthetic construct; identical to SEQ ID NO: 14725
  misc_feature 1..384: note = Description of Artificial Sequence: Synthetic polynucleotide
  source 1..384: mol_type = other DNA

SEQ ID NO: 15994 - DNA, 216 bp, synthetic construct; identical to SEQ ID NO: 14726
  misc_feature 1..216: note = Description of Artificial Sequence: Synthetic polynucleotide
  source 1..216: mol_type = other DNA

SEQ ID NO: 15995 - DNA, 334 bp, synthetic construct; identical to SEQ ID NO: 14727
  misc_feature 1..334: note = Description of Artificial Sequence: Synthetic polynucleotide
  source 1..334: mol_type = other DNA

SEQ ID NO: 15996 - DNA, 201 bp, synthetic construct; identical to SEQ ID NO: 14728
  misc_feature 1..201: note = Description of Artificial Sequence: Synthetic polynucleotide
  source 1..201: mol_type = other DNA

SEQ ID NO: 15997 - DNA, 270 bp, synthetic construct; identical to SEQ ID NO: 14729
  misc_feature 1..270: note = Description of Artificial Sequence: Synthetic polynucleotide
  source 1..270: mol_type = other DNA

SEQ ID NO: 15998 - DNA, 253 bp, synthetic construct; identical to SEQ ID NO: 14730
  misc_feature 1..253: note = Description of Artificial Sequence: Synthetic polynucleotide
  source 1..253: mol_type = other DNA

SEQ ID NO: 15999 - DNA, 204 bp, synthetic construct; identical to SEQ ID NO: 14731
  misc_feature 1..204: note = Description of Artificial Sequence: Synthetic polynucleotide
  source 1..204: mol_type = other DNA

SEQ ID NO: 16000 - DNA, 228 bp, synthetic construct; identical to SEQ ID NO: 14732
  misc_feature 1..228: note = Description of Artificial Sequence: Synthetic polynucleotide
  source 1..228: mol_type = other DNA

SEQ ID NO: 16001 - DNA, 217 bp, synthetic construct; identical to SEQ ID NO: 14733
  misc_feature 1..217: note = Description of Artificial Sequence: Synthetic polynucleotide
  source 1..217: mol_type = other DNA

SEQ ID NO: 16002 - DNA, 201 bp, synthetic construct; identical to SEQ ID NO: 14734
  misc_feature 1..201: note = Description of Artificial Sequence: Synthetic polynucleotide
  source 1..201: mol_type = other DNA

SEQ ID NO: 16003 - DNA, 204 bp, synthetic construct; identical to SEQ ID NO: 14735
  misc_feature 1..204: note = Description of Artificial Sequence: Synthetic polynucleotide
  source 1..204: mol_type = other DNA

SEQ ID NO: 16004 - DNA, 223 bp, synthetic construct; identical to SEQ ID NO: 14736
  misc_feature 1..223: note = Description of Artificial Sequence: Synthetic polynucleotide
  source 1..223: mol_type = other DNA

SEQ ID NO: 16005 - DNA, 201 bp, synthetic construct; identical to SEQ ID NO: 14737
  misc_feature 1..201: note = Description of Artificial Sequence: Synthetic polynucleotide
  source 1..201: mol_type = other DNA

SEQ ID NO: 16006 - DNA, 203 bp, synthetic construct; identical to SEQ ID NO: 14738
  misc_feature 1..203: note = Description of Artificial Sequence: Synthetic polynucleotide
  source 1..203: mol_type = other DNA

SEQ ID NO: 16007 - DNA, 201 bp, synthetic construct; identical to SEQ ID NO: 14739
  misc_feature 1..201: note = Description of Artificial Sequence: Synthetic polynucleotide
  source 1..201: mol_type = other DNA

SEQ ID NO: 16008 - DNA, 211 bp, synthetic construct; identical to SEQ ID NO: 14749
  misc_feature 1..211: note = Description of Artificial Sequence: Synthetic polynucleotide
  source 1..211: mol_type = other DNA

SEQ ID NO: 16009 - DNA, 201 bp, synthetic construct; identical to SEQ ID NO: 14760
  misc_feature 1..201: note = Description of Artificial Sequence: Synthetic polynucleotide
  source 1..201: mol_type = other DNA

SEQ ID NO: 16010 - DNA, 279 bp, synthetic construct; identical to SEQ ID NO: 14771
  misc_feature 1..279: note = Description of Artificial Sequence: Synthetic polynucleotide
  source 1..279: mol_type = other DNA

SEQ ID NO: 16011 - DNA, 203 bp, synthetic construct; identical to SEQ ID NO: 14782
  misc_feature 1..203: note = Description of Artificial Sequence: Synthetic polynucleotide
  source 1..203: mol_type = other DNA

SEQ ID NO: 16012 - DNA, 3238 bp, synthetic construct; identical to SEQ ID NO: 14793
  misc_feature 1..3238: note = Description of Artificial Sequence: Synthetic polynucleotide
  source 1..3238: mol_type = other DNA

SEQ ID NO: 16013 - DNA, 201 bp, synthetic construct; identical to SEQ ID NO: 14804
  misc_feature 1..201: note = Description of Artificial Sequence: Synthetic polynucleotide
  source 1..201: mol_type = other DNA

SEQ ID NO: 16014 - DNA, 208 bp, synthetic construct; identical to SEQ ID NO: 14805
  misc_feature 1..208: note = Description of Artificial Sequence: Synthetic polynucleotide
  source 1..208: mol_type = other DNA

SEQ ID NO: 16015 - DNA, 235 bp, synthetic construct; identical to SEQ ID NO: 14816
  misc_feature 1..235: note = Description of Artificial Sequence: Synthetic polynucleotide
  source 1..235: mol_type = other DNA

SEQ ID NO: 16016 - DNA, 207 bp, synthetic construct; identical to SEQ ID NO: 14827
  misc_feature 1..207: note = Description of Artificial Sequence: Synthetic polynucleotide
  source 1..207: mol_type = other DNA

SEQ ID NO: 16017 - DNA, 380 bp, synthetic construct; identical to SEQ ID NO: 14838
  misc_feature 1..380: note = Description of Artificial Sequence: Synthetic polynucleotide
  source 1..380: mol_type = other DNA

SEQ ID NO: 16018 - DNA, 568 bp, synthetic construct; identical to SEQ ID NO: 14849
  misc_feature 1..568: note = Description of Artificial Sequence: Synthetic polynucleotide
  source 1..568: mol_type = other DNA

SEQ ID NO: 16019 - DNA, 201 bp, synthetic construct; identical to SEQ ID NO: 14860
  misc_feature 1..201: note = Description of Artificial Sequence: Synthetic polynucleotide
  source 1..201: mol_type = other DNA

SEQ ID NO: 16020 - DNA, 234 bp, synthetic construct; identical to SEQ ID NO: 14871
  misc_feature 1..234: note = Description of Artificial Sequence: Synthetic polynucleotide
  source 1..234: mol_type = other DNA

SEQ ID NO: 16021 - DNA, 686 bp, synthetic construct; identical to SEQ ID NO: 14882
  misc_feature 1..686: note = Description of Artificial Sequence: Synthetic polynucleotide
  source 1..686: mol_type = other DNA

SEQ ID NO: 16022 - DNA, 227 bp, synthetic construct; identical to SEQ ID NO: 14893
  misc_feature 1..227: note = Description of Artificial Sequence: Synthetic polynucleotide
  source 1..227: mol_type = other DNA

SEQ ID NO: 16023 - DNA, 201 bp, synthetic construct; identical to SEQ ID NO: 14904
  misc_feature 1..201: note = Description of Artificial Sequence: Synthetic polynucleotide
  source 1..201: mol_type = other DNA

SEQ ID NO: 16024 - DNA, 217 bp, synthetic construct; identical to SEQ ID NO: 14915
  misc_feature 1..217: note = Description of Artificial Sequence: Synthetic polynucleotide
  source 1..217: mol_type = other DNA

SEQ ID NO: 16025 - DNA, 217 bp, synthetic construct; identical to SEQ ID NO: 14916
  misc_feature 1..217: note = Description of Artificial Sequence: Synthetic polynucleotide
  source 1..217: mol_type = other DNA

SEQ ID NO: 16026 - DNA, 286 bp, synthetic construct; identical to SEQ ID NO: 14927
  misc_feature 1..286: note = Description of Artificial Sequence: Synthetic polynucleotide
  source 1..286: mol_type = other DNA

SEQ ID NO: 16027 - DNA, 210 bp, synthetic construct; identical to SEQ ID NO: 14938
  misc_feature 1..210: note = Description of Artificial Sequence: Synthetic polynucleotide
  source 1..210: mol_type = other DNA

SEQ ID NO: 16028 - DNA, 201 bp, synthetic construct; identical to SEQ ID NO: 14949
  misc_feature 1..201: note = Description of Artificial Sequence: Synthetic polynucleotide
  source 1..201: mol_type = other DNA

SEQ ID NO: 16029 - DNA, 366 bp, synthetic construct; identical to SEQ ID NO: 14958
  misc_feature 1..366: note = Description of Artificial Sequence: Synthetic polynucleotide
  source 1..366: mol_type = other DNA

SEQ ID NO: 16030 - DNA, 201 bp, synthetic construct; identical to SEQ ID NO: 14959
  misc_feature 1..201: note = Description of Artificial Sequence: Synthetic polynucleotide
  source 1..201: mol_type = other DNA

SEQ ID NO: 16031 - DNA, 201 bp, synthetic construct; identical to SEQ ID NO: 14960
  misc_feature 1..201: note = Description of Artificial Sequence: Synthetic polynucleotide
  source 1..201: mol_type = other DNA

SEQ ID NO: 16032 - DNA, 201 bp, synthetic construct; identical to SEQ ID NO: 14961
  misc_feature 1..201: note = Description of Artificial Sequence: Synthetic polynucleotide
  source 1..201: mol_type = other DNA

SEQ ID NO: 16033 - DNA, 384 bp, synthetic construct; identical to SEQ ID NO: 14962
  misc_feature 1..384: note = Description of Artificial Sequence: Synthetic polynucleotide
  source 1..384: mol_type = other DNA

SEQ ID NO: 16034 - DNA, 216 bp, synthetic construct; identical to SEQ ID NO: 14963
  misc_feature 1..216: note = Description of Artificial Sequence: Synthetic polynucleotide
  source 1..216: mol_type = other DNA

SEQ ID NO: 16035 - DNA, 334 bp, synthetic construct; identical to SEQ ID NO: 14964
  misc_feature 1..334: note = Description of Artificial Sequence: Synthetic polynucleotide
  source 1..334: mol_type = other DNA

SEQ ID NO: 16036 - DNA, 201 bp, synthetic construct; identical to SEQ ID NO: 14965
  misc_feature 1..201: note = Description of Artificial Sequence: Synthetic polynucleotide
  source 1..201: mol_type = other DNA

SEQ ID NO: 16037 - DNA, 270 bp, synthetic construct; identical to SEQ ID NO: 14966
  misc_feature 1..270: note = Description of Artificial Sequence: Synthetic polynucleotide
  source 1..270: mol_type = other DNA

SEQ ID NO: 16038 - DNA, 253 bp, synthetic construct; identical to SEQ ID NO: 14967
  misc_feature 1..253: note = Description of Artificial Sequence: Synthetic polynucleotide
  source 1..253: mol_type = other DNA

SEQ ID NO: 16039 - DNA, 204 bp, synthetic construct; identical to SEQ ID NO: 14968
  misc_feature 1..204: note = Description of Artificial Sequence: Synthetic polynucleotide
  source 1..204: mol_type = other DNA

SEQ ID NO: 16040 - DNA, 228 bp, synthetic construct; identical to SEQ ID NO: 14969
  misc_feature 1..228: note = Description of Artificial Sequence: Synthetic polynucleotide
  source 1..228: mol_type = other DNA

SEQ ID NO: 16041 - DNA, 217 bp, synthetic construct; identical to SEQ ID NO: 14970
  misc_feature 1..217: note = Description of Artificial Sequence: Synthetic polynucleotide
  source 1..217: mol_type = other DNA

SEQ ID NO: 16042 - DNA, 201 bp, synthetic construct; identical to SEQ ID NO: 14971
  misc_feature 1..201: note = Description of Artificial Sequence: Synthetic polynucleotide
  source 1..201: mol_type = other DNA

SEQ ID NO: 16043 - DNA, 204 bp, synthetic construct; identical to SEQ ID NO: 14972
  misc_feature 1..204: note = Description of Artificial Sequence: Synthetic polynucleotide
  source 1..204: mol_type = other DNA

SEQ ID NO: 16044 - DNA, 223 bp, synthetic construct; identical to SEQ ID NO: 14973
  misc_feature 1..223: note = Description of Artificial Sequence: Synthetic polynucleotide
  source 1..223: mol_type = other DNA

SEQ ID NO: 16045 - DNA, 201 bp, synthetic construct; identical to SEQ ID NO: 14974
  misc_feature 1..201: note = Description of Artificial Sequence: Synthetic polynucleotide
  source 1..201: mol_type = other DNA

SEQ ID NO: 16046 - DNA, 203 bp, synthetic construct; identical to SEQ ID NO: 14975
  misc_feature 1..203: note = Description of Artificial Sequence: Synthetic polynucleotide
  source 1..203: mol_type = other DNA

SEQ ID NO: 16047 - DNA, 201 bp, synthetic construct; identical to SEQ ID NO: 14976
  misc_feature 1..201: note = Description of Artificial Sequence: Synthetic polynucleotide
  source 1..201: mol_type = other DNA

SEQ ID NO: 16048 - DNA, 211 bp, synthetic construct; identical to SEQ ID NO: 14986
  misc_feature 1..211: note = Description of Artificial Sequence: Synthetic polynucleotide
  source 1..211: mol_type = other DNA

SEQ ID NO: 16049 - DNA, 201 bp, synthetic construct; identical to SEQ ID NO: 14997
  misc_feature 1..201: note = Description of Artificial Sequence: Synthetic polynucleotide
  source 1..201: mol_type = other DNA

SEQ ID NO: 16050 - DNA, 279 bp, synthetic construct; identical to SEQ ID NO: 15008
  misc_feature 1..279: note = Description of Artificial Sequence: Synthetic polynucleotide
  source 1..279: mol_type = other DNA

SEQ ID NO: 16051 - DNA, 203 bp, synthetic construct; identical to SEQ ID NO: 15019
  misc_feature 1..203: note = Description of Artificial Sequence: Synthetic polynucleotide
  source 1..203: mol_type = other DNA

SEQ ID NO: 16052 - DNA, 3238 bp, synthetic construct; identical to SEQ ID NO: 15030
  misc_feature 1..3238: note = Description of Artificial Sequence: Synthetic polynucleotide
  source 1..3238: mol_type = other DNA

SEQ ID NO: 16053 - DNA, 201 bp, synthetic construct; identical to SEQ ID NO: 15041
  misc_feature 1..201: note = Description of Artificial Sequence: Synthetic polynucleotide
  source 1..201: mol_type = other DNA

SEQ ID NO: 16054 - DNA, 208 bp, synthetic construct; identical to SEQ ID NO: 15042
  misc_feature 1..208: note = Description of Artificial Sequence: Synthetic polynucleotide
  source 1..208: mol_type = other DNA

SEQ ID NO: 16055 - DNA, 235 bp, synthetic construct; identical to SEQ ID NO: 15053
  misc_feature 1..235: note = Description of Artificial Sequence: Synthetic polynucleotide
  source 1..235: mol_type = other DNA

SEQ ID NO: 16056 - DNA, 207 bp, synthetic construct; identical to SEQ ID NO: 15064
  misc_feature 1..207: note = Description of Artificial Sequence: Synthetic polynucleotide
  source 1..207: mol_type = other DNA

SEQ ID NO: 16057 - DNA, 380 bp, synthetic construct; identical to SEQ ID NO: 15075
  misc_feature 1..380: note = Description of Artificial Sequence: Synthetic polynucleotide
  source 1..380: mol_type = other DNA

SEQ ID NO: 16058 - DNA, 568 bp, synthetic construct; identical to SEQ ID NO: 15086
  misc_feature 1..568: note = Description of Artificial Sequence: Synthetic polynucleotide
  source 1..568: mol_type = other DNA

SEQ ID NO: 16059 - DNA, 201 bp, synthetic construct; identical to SEQ ID NO: 15097
  misc_feature 1..201: note = Description of Artificial Sequence: Synthetic polynucleotide
  source 1..201: mol_type = other DNA

SEQ ID NO: 16060 - DNA, 234 bp, synthetic construct; identical to SEQ ID NO: 15108
  misc_feature 1..234: note = Description of Artificial Sequence: Synthetic polynucleotide
  source 1..234: mol_type = other DNA

SEQ ID NO: 16061 - DNA, 686 bp, synthetic construct; identical to SEQ ID NO: 15119
  misc_feature 1..686: note = Description of Artificial Sequence: Synthetic polynucleotide
  source 1..686: mol_type = other DNA

SEQ ID NO: 16062 - DNA, 227 bp, synthetic construct; identical to SEQ ID NO: 15130
  misc_feature 1..227: note = Description of Artificial Sequence: Synthetic polynucleotide
  source 1..227: mol_type = other DNA

SEQ ID NO: 16063 - DNA, 201 bp, synthetic construct; identical to SEQ ID NO: 15141
  misc_feature 1..201: note = Description of Artificial Sequence: Synthetic polynucleotide
  source 1..201: mol_type = other DNA

SEQ ID NO: 16064 - DNA, 217 bp, synthetic construct; identical to SEQ ID NO: 15152
  misc_feature 1..217: note = Description of Artificial Sequence: Synthetic polynucleotide
  source 1..217: mol_type = other DNA

SEQ ID NO: 16065 - DNA, 217 bp, synthetic construct; identical to SEQ ID NO: 15153
  misc_feature 1..217: note = Description of Artificial Sequence: Synthetic polynucleotide
  source 1..217: mol_type = other DNA

SEQ ID NO: 16066 - DNA, 286 bp, synthetic construct; identical to SEQ ID NO: 15164
  misc_feature 1..286: note = Description of Artificial Sequence: Synthetic polynucleotide
  source 1..286: mol_type = other DNA

SEQ ID NO: 16067 - DNA, 210 bp, synthetic construct; identical to SEQ ID NO: 15175
  misc_feature 1..210: note = Description of Artificial Sequence: Synthetic polynucleotide
  source 1..210: mol_type = other DNA

SEQ ID NO: 16068 - DNA, 201 bp, synthetic construct; identical to SEQ ID NO: 15186
  misc_feature 1..201: note = Description of Artificial Sequence: Synthetic polynucleotide
  source 1..201: mol_type = other DNA

SEQ ID NO: 16069 - DNA, 366 bp, synthetic construct; identical to SEQ ID NO: 15195
  misc_feature 1..366: note = Description of Artificial Sequence: Synthetic polynucleotide
  source 1..366: mol_type = other DNA

SEQ ID NO: 16070 - DNA, 201 bp, synthetic construct; identical to SEQ ID NO: 15196
  misc_feature 1..201: note = Description of Artificial Sequence: Synthetic polynucleotide
  source 1..201: mol_type = other DNA

SEQ ID NO: 16071 - DNA, 201 bp, synthetic construct; identical to SEQ ID NO: 15197
  misc_feature 1..201: note = Description of Artificial Sequence: Synthetic polynucleotide
  source 1..201: mol_type = other DNA

SEQ ID NO: 16072 - DNA, 201 bp, synthetic construct; identical to SEQ ID NO: 15198
  misc_feature 1..201: note = Description of Artificial Sequence: Synthetic polynucleotide
  source 1..201: mol_type = other DNA

SEQ ID NO: 16073 - DNA, 384 bp, synthetic construct; identical to SEQ ID NO: 15199
  misc_feature 1..384: note = Description of Artificial Sequence: Synthetic polynucleotide
  source 1..384: mol_type = other DNA

SEQ ID NO: 16074 - DNA, 216 bp, synthetic construct; identical to SEQ ID NO: 15200
  misc_feature 1..216: note = Description of Artificial Sequence: Synthetic polynucleotide
  source 1..216: mol_type = other DNA

SEQ ID NO: 16075 - DNA, 334 bp, synthetic construct; identical to SEQ ID NO: 15201
  misc_feature 1..334: note = Description of Artificial Sequence: Synthetic polynucleotide
  source 1..334: mol_type = other DNA

SEQ ID NO: 16076 - DNA, 201 bp, synthetic construct; identical to SEQ ID NO: 15202
  misc_feature 1..201: note = Description of Artificial Sequence: Synthetic polynucleotide
  source 1..201: mol_type = other DNA

SEQ ID NO: 16077 - DNA, 270 bp, synthetic construct; identical to SEQ ID NO: 15203
  misc_feature 1..270: note = Description of Artificial Sequence: Synthetic polynucleotide
  source 1..270: mol_type = other DNA

SEQ ID NO: 16078 - DNA, 253 bp, synthetic construct; identical to SEQ ID NO: 15204
  misc_feature 1..253: note = Description of Artificial Sequence: Synthetic polynucleotide
  source 1..253: mol_type = other DNA

SEQ ID NO: 16079 - DNA, 204 bp, synthetic construct; identical to SEQ ID NO: 15205
  misc_feature 1..204: note = Description of Artificial Sequence: Synthetic polynucleotide
  source 1..204: mol_type = other DNA

SEQ ID NO: 16080 - DNA, 228 bp, synthetic construct; identical to SEQ ID NO: 15206
  misc_feature 1..228: note = Description of Artificial Sequence: Synthetic polynucleotide
  source 1..228: mol_type = other DNA

SEQ ID NO: 16081 - DNA, 217 bp, synthetic construct; identical to SEQ ID NO: 15207
  misc_feature 1..217: note = Description of Artificial Sequence: Synthetic polynucleotide
  source 1..217: mol_type = other DNA

SEQ ID NO: 16082 - DNA, 201 bp, synthetic construct; identical to SEQ ID NO: 15208
  misc_feature 1..201: note = Description of Artificial Sequence: Synthetic polynucleotide
  source 1..201: mol_type = other DNA

SEQ ID NO: 16083 - DNA, 204 bp, synthetic construct; identical to SEQ ID NO: 15209
  misc_feature 1..204: note = Description of Artificial Sequence: Synthetic polynucleotide
  source 1..204: mol_type = other DNA

SEQ ID NO: 16084 - DNA, 223 bp, synthetic construct; identical to SEQ ID NO: 15210
  misc_feature 1..223: note = Description of Artificial Sequence: Synthetic polynucleotide
  source 1..223: mol_type = other DNA

SEQ ID NO: 16085 - DNA, 201 bp, synthetic construct; identical to SEQ ID NO: 15211
  misc_feature 1..201: note = Description of Artificial Sequence: Synthetic polynucleotide
  source 1..201: mol_type = other DNA

SEQ ID NO: 16086 - DNA, 203 bp, synthetic construct; identical to SEQ ID NO: 15212
  misc_feature 1..203: note = Description of Artificial Sequence: Synthetic polynucleotide
  source 1..203: mol_type = other DNA

SEQ ID NO: 16087 - DNA, 201 bp, synthetic construct; identical to SEQ ID NO: 15213
  misc_feature 1..201: note = Description of Artificial Sequence: Synthetic polynucleotide
  source 1..201: mol_type = other DNA

SEQ ID NO: 16088 - DNA, 211 bp, synthetic construct; identical to SEQ ID NO: 15223
  misc_feature 1..211: note = Description of Artificial Sequence: Synthetic polynucleotide
  source 1..211: mol_type = other DNA

SEQ ID NO: 16089 - DNA, 201 bp, synthetic construct; identical to SEQ ID NO: 15234
  misc_feature 1..201: note = Description of Artificial Sequence: Synthetic polynucleotide
  source 1..201: mol_type = other DNA

SEQ ID NO: 16090 - DNA, 279 bp, synthetic construct; identical to SEQ ID NO: 15245
  misc_feature 1..279: note = Description of Artificial Sequence: Synthetic polynucleotide
  source 1..279: mol_type = other DNA

SEQ ID NO: 16091 - DNA, 203 bp, synthetic construct; identical to SEQ ID NO: 15256
  misc_feature 1..203: note = Description of Artificial Sequence: Synthetic polynucleotide
  source 1..203: mol_type = other DNA

SEQ ID NO: 16092 - DNA, 3238 bp, synthetic construct; identical to SEQ ID NO: 15267
  misc_feature 1..3238: note = Description of Artificial Sequence: Synthetic polynucleotide
  source 1..3238: mol_type = other DNA

SEQ ID NO: 16093 - DNA, 201 bp, synthetic construct; identical to SEQ ID NO: 15278
  misc_feature 1..201: note = Description of Artificial Sequence: Synthetic polynucleotide
  source 1..201: mol_type = other DNA

SEQ ID NO: 16094 - DNA, 208 bp, synthetic construct; identical to SEQ ID NO: 15279
  misc_feature 1..208: note = Description of Artificial Sequence: Synthetic polynucleotide
  source 1..208: mol_type = other DNA

SEQ ID NO: 16095 - DNA, 235 bp, synthetic construct; identical to SEQ ID NO: 15290
  misc_feature 1..235: note = Description of Artificial Sequence: Synthetic polynucleotide
  source 1..235: mol_type = other DNA

SEQ ID NO: 16096 - DNA, 207 bp, synthetic construct; identical to SEQ ID NO: 15301
  misc_feature 1..207: note = Description of Artificial Sequence: Synthetic polynucleotide
  source 1..207: mol_type = other DNA

SEQ ID NO: 16097 - DNA, 380 bp, synthetic construct; identical to SEQ ID NO: 15312
  misc_feature 1..380: note = Description of Artificial Sequence: Synthetic polynucleotide
  source 1..380: mol_type = other DNA

SEQ ID NO: 16098 - DNA, 568 bp, synthetic construct; identical to SEQ ID NO: 15323
  misc_feature 1..568: note = Description of Artificial Sequence: Synthetic polynucleotide
  source 1..568: mol_type = other DNA

SEQ ID NO: 16099 - DNA, 201 bp, synthetic construct; identical to SEQ ID NO: 15334
  misc_feature 1..201: note = Description of Artificial Sequence: Synthetic polynucleotide
  source 1..201: mol_type = other DNA

SEQ ID NO: 16100 - DNA, 234 bp, synthetic construct; identical to SEQ ID NO: 15345
  misc_feature 1..234: note = Description of Artificial Sequence: Synthetic polynucleotide
  source 1..234: mol_type = other DNA

SEQ ID NO: 16101 - DNA, 686 bp, synthetic construct; identical to SEQ ID NO: 15356
  misc_feature 1..686: note = Description of Artificial Sequence: Synthetic polynucleotide
  source 1..686: mol_type = other DNA

SEQ ID NO: 16102 - DNA, 227 bp, synthetic construct; identical to SEQ ID NO: 15367
  misc_feature 1..227: note = Description of Artificial Sequence: Synthetic polynucleotide
  source 1..227: mol_type = other DNA

SEQ ID NO: 16103 - DNA, 201 bp, synthetic construct; identical to SEQ ID NO: 15378
  misc_feature 1..201: note = Description of Artificial Sequence: Synthetic polynucleotide
  source 1..201: mol_type = other DNA

SEQ ID NO: 16104 - DNA, 217 bp, synthetic construct; identical to SEQ ID NO: 15389
  misc_feature 1..217: note = Description of Artificial Sequence: Synthetic polynucleotide
  source 1..217: mol_type = other DNA

SEQ ID NO: 16105 - DNA, 217 bp, synthetic construct; identical to SEQ ID NO: 15390
  misc_feature 1..217: note = Description of Artificial Sequence: Synthetic polynucleotide
  source 1..217: mol_type = other DNA

SEQ ID NO: 16106 - DNA, 286 bp, synthetic construct; identical to SEQ ID NO: 15401
  misc_feature 1..286: note = Description of Artificial Sequence: Synthetic polynucleotide
  source 1..286: mol_type = other DNA

SEQ ID NO: 16107 - DNA, 210 bp, synthetic construct; identical to SEQ ID NO: 15412
  misc_feature 1..210: note = Description of Artificial Sequence: Synthetic polynucleotide
  source 1..210: mol_type = other DNA

SEQ ID NO: 16108 - DNA, 201 bp, synthetic construct; identical to SEQ ID NO: 15423
  misc_feature 1..201: note = Description of Artificial Sequence: Synthetic polynucleotide
  source 1..201: mol_type = other DNA

SEQ ID NO: 16109 - DNA, 366 bp, synthetic construct; identical to SEQ ID NO: 15432
  misc_feature 1..366: note = Description of Artificial Sequence: Synthetic polynucleotide
  source 1..366: mol_type = other DNA

SEQ ID NO: 16110 - DNA, 201 bp, synthetic construct; identical to SEQ ID NO: 15433
  misc_feature 1..201: note = Description of Artificial Sequence: Synthetic polynucleotide
  source 1..201: mol_type = other DNA

SEQ ID NO: 16111 - DNA, 201 bp, synthetic construct; identical to SEQ ID NO: 15434
  misc_feature 1..201: note = Description of Artificial Sequence: Synthetic polynucleotide
  source 1..201: mol_type = other DNA

SEQ ID NO: 16112 - DNA, 201 bp, synthetic construct; identical to SEQ ID NO: 15435
  misc_feature 1..201: note = Description of Artificial Sequence: Synthetic polynucleotide
  source 1..201: mol_type = other DNA

SEQ ID NO: 16113 - DNA, 384 bp, synthetic construct; identical to SEQ ID NO: 15436
  misc_feature 1..384: note = Description of Artificial Sequence: Synthetic polynucleotide
  source 1..384: mol_type = other DNA

SEQ ID NO: 16114 - DNA, 216 bp, synthetic construct; identical to SEQ ID NO: 15437
  misc_feature 1..216: note = Description of Artificial Sequence: Synthetic polynucleotide
  source 1..216: mol_type = other DNA

SEQ ID NO: 16115 - DNA, 334 bp, synthetic construct; identical to SEQ ID NO: 15438
  misc_feature 1..334: note = Description of Artificial Sequence: Synthetic polynucleotide
  source 1..334: mol_type = other DNA

SEQ ID NO: 16116 - DNA, 201 bp, synthetic construct; identical to SEQ ID NO: 15439
  misc_feature 1..201: note = Description of Artificial Sequence: Synthetic polynucleotide
  source 1..201: mol_type = other DNA

SEQ ID NO: 16117 - DNA, 270 bp, synthetic construct; identical to SEQ ID NO: 15440
  misc_feature 1..270: note = Description of Artificial Sequence: Synthetic polynucleotide
  source 1..270: mol_type = other DNA

SEQ ID NO: 16118 - DNA, 253 bp, synthetic construct; identical to SEQ ID NO: 15441
  misc_feature 1..253: note = Description of Artificial Sequence: Synthetic polynucleotide
  source 1..253: mol_type = other DNA

SEQ ID NO: 16119 - DNA, 204 bp, synthetic construct; identical to SEQ ID NO: 15442
  misc_feature 1..204: note = Description of Artificial Sequence: Synthetic polynucleotide
  source 1..204: mol_type = other DNA

SEQ ID NO: 16120 - DNA, 228 bp, synthetic construct; identical to SEQ ID NO: 15443
  misc_feature 1..228: note = Description of Artificial Sequence: Synthetic polynucleotide
  source 1..228: mol_type = other DNA

SEQ ID NO: 16121 - DNA, 217 bp, synthetic construct; identical to SEQ ID NO: 15444
  misc_feature 1..217: note = Description of Artificial Sequence: Synthetic polynucleotide
  source 1..217: mol_type = other DNA

SEQ ID NO: 16122 - DNA, 201 bp, synthetic construct; identical to SEQ ID NO: 15445
  misc_feature 1..201: note = Description of Artificial Sequence: Synthetic polynucleotide
  source 1..201: mol_type = other DNA

SEQ ID NO: 16123 - DNA, 204 bp, synthetic construct; identical to SEQ ID NO: 15446
  misc_feature 1..204: note = Description of Artificial Sequence: Synthetic polynucleotide
  source 1..204: mol_type = other DNA

SEQ ID NO: 16124 - DNA, 223 bp, synthetic construct; identical to SEQ ID NO: 15447
  misc_feature 1..223: note = Description of Artificial Sequence: Synthetic polynucleotide
  source 1..223: mol_type = other DNA

SEQ ID NO: 16125 - DNA, 201 bp, synthetic construct; identical to SEQ ID NO: 15448
  misc_feature 1..201: note = Description of Artificial Sequence: Synthetic polynucleotide
  source 1..201: mol_type = other DNA

SEQ ID NO: 16126 - DNA, 203 bp, synthetic construct; identical to SEQ ID NO: 15449
  misc_feature 1..203: note = Description of Artificial Sequence: Synthetic polynucleotide
  source 1..203: mol_type = other DNA

SEQ ID NO: 16127 - DNA, 201 bp, synthetic construct; identical to SEQ ID NO: 15450
  misc_feature 1..201: note = Description of Artificial Sequence: Synthetic polynucleotide
  source 1..201: mol_type = other DNA

SEQ ID NO: 16128 - DNA, 211 bp, synthetic construct; identical to SEQ ID NO: 15460
  misc_feature 1..211: note = Description of Artificial Sequence: Synthetic polynucleotide
  source 1..211: mol_type = other DNA

SEQ ID NO: 16129 - DNA, 201 bp, synthetic construct; identical to SEQ ID NO: 15471
  misc_feature 1..201: note = Description of Artificial Sequence: Synthetic polynucleotide
  source 1..201: mol_type = other DNA

SEQ ID NO: 16130 - DNA, 279 bp, synthetic construct; identical to SEQ ID NO: 15482
  misc_feature 1..279: note = Description of Artificial Sequence: Synthetic polynucleotide
  source 1..279: mol_type = other DNA

SEQ ID NO: 16131 - DNA, 203 bp, synthetic construct; identical to SEQ ID NO: 15493
  misc_feature 1..203: note = Description of Artificial Sequence: Synthetic polynucleotide
  source 1..203: mol_type = other DNA

SEQ ID NO: 16132 - DNA, 3238 bp, synthetic construct; identical to SEQ ID NO: 15504
  misc_feature 1..3238: note = Description of Artificial Sequence: Synthetic polynucleotide
  source 1..3238: mol_type = other DNA

SEQ ID NO: 16133 - DNA, 223 bp, Homo sapiens; identical to SEQ ID NO: 15522
  source 1..223: mol_type = unassigned DNA

SEQ ID NO: 16134 - DNA, 676 bp, Homo sapiens; identical to SEQ ID NO: 15528
  source 1..676: mol_type = unassigned DNA

SEQ ID NO: 16135 - DNA, 1238 bp, Homo sapiens; identical to SEQ ID NO: 15529
  source 1..1238: mol_type = unassigned DNA

SEQ ID NO: 16136 - DNA, 220 bp, Homo sapiens; identical to SEQ ID NO: 15530
  source 1..220: mol_type = unassigned DNA

SEQ ID NO: 16137 - DNA, 631 bp, Homo sapiens; identical to SEQ ID NO: 15531
  source 1..631: mol_type = unassigned DNA

SEQ ID NO: 16138 - DNA, 223 bp, Homo sapiens; identical to SEQ ID NO: 15545
  source 1..223: mol_type = unassigned DNA

SEQ ID NO: 16139 - DNA, 676 bp, Homo sapiens; identical to SEQ ID NO: 15551
  source 1..676: mol_type = unassigned DNA

SEQ ID NO: 16140 - DNA, 1238 bp, Homo sapiens; identical to SEQ ID NO: 15552
  source 1..1238: mol_type = unassigned DNA

SEQ ID NO: 16141 - DNA, 220 bp, Homo sapiens; identical to SEQ ID NO: 15553
  source 1..220: mol_type = unassigned DNA

SEQ ID NO: 16142 - DNA, 631 bp, Homo sapiens; identical to SEQ ID NO: 15554
  source 1..631: mol_type = unassigned DNA

SEQ ID NO: 16143 - DNA, 223 bp, synthetic construct; identical to SEQ ID NO: 15568
  misc_feature 1..223: note = Description of Artificial Sequence: Synthetic polynucleotide
  source 1..223: mol_type = other DNA

SEQ ID NO: 16144 - DNA, 676 bp, synthetic construct; identical to SEQ ID NO: 15574
  misc_feature 1..676: note = Description of Artificial Sequence: Synthetic polynucleotide
  source 1..676: mol_type = other DNA

SEQ ID NO: 16145 - DNA, 1238 bp, synthetic construct; identical to SEQ ID NO: 15575
  misc_feature 1..1238: note = Description of Artificial Sequence: Synthetic polynucleotide
  source 1..1238: mol_type = other DNA

SEQ ID NO: 16146 - DNA, 220 bp, synthetic construct; identical to SEQ ID NO: 15576
  misc_feature 1..220: note = Description of Artificial Sequence: Synthetic polynucleotide
  source 1..220: mol_type = other DNA

SEQ ID NO: 16147 - DNA, 631 bp, synthetic construct; identical to SEQ ID NO: 15577
  misc_feature 1..631: note = Description of Artificial Sequence: Synthetic polynucleotide
  source 1..631: mol_type = other DNA

SEQ ID NO: 16148 - DNA, 223 bp, synthetic construct; identical to SEQ ID NO: 15591
  misc_feature 1..223: note = Description of Artificial Sequence: Synthetic polynucleotide
  source 1..223: mol_type = other DNA

SEQ ID NO: 16149 - DNA, 676 bp, synthetic construct; identical to SEQ ID NO: 15597
  misc_feature 1..676: note = Description of Artificial Sequence: Synthetic polynucleotide
  source 1..676: mol_type = other DNA

SEQ ID NO: 16150 - DNA, 1238 bp, synthetic construct; identical to SEQ ID NO: 15598
  misc_feature 1..1238: note = Description of Artificial Sequence: Synthetic polynucleotide
  source 1..1238: mol_type = other DNA

SEQ ID NO: 16151 - DNA, 220 bp, synthetic construct; identical to SEQ ID NO: 15599
  misc_feature 1..220: note = Description of Artificial Sequence: Synthetic polynucleotide
  source 1..220: mol_type = other DNA

SEQ ID NO: 16152 - DNA, 631 bp, synthetic construct; identical to SEQ ID NO: 15600
  misc_feature 1..631: note = Description of Artificial Sequence: Synthetic polynucleotide
  source 1..631: mol_type = other DNA

SEQ ID NO: 16153 - DNA, 223 bp, synthetic construct; identical to SEQ ID NO: 15614
  misc_feature 1..223: note = Description of Artificial Sequence: Synthetic polynucleotide
  source 1..223: mol_type = other DNA

SEQ ID NO: 16154 - DNA, 676 bp, synthetic construct; identical to SEQ ID NO: 15620
  misc_feature 1..676: note = Description of Artificial Sequence: Synthetic polynucleotide
  source 1..676: mol_type = other DNA

SEQ ID NO: 16155 - DNA, 1238 bp, synthetic construct; identical to SEQ ID NO: 15621
  misc_feature 1..1238: note = Description of Artificial Sequence: Synthetic polynucleotide
  source 1..1238: mol_type = other DNA

SEQ ID NO: 16156 - DNA, 220 bp, synthetic construct; identical to SEQ ID NO: 15622
  misc_feature 1..220: note = Description of Artificial Sequence: Synthetic polynucleotide
  source 1..220: mol_type = other DNA

SEQ ID NO: 16157 - DNA, 631 bp, synthetic construct; identical to SEQ ID NO: 15623
  misc_feature 1..631: note = Description of Artificial Sequence: Synthetic polynucleotide
  source 1..631: mol_type = other DNA

SEQ ID NO: 16158 - DNA, 223 bp, synthetic construct; identical to SEQ ID NO: 15637
  misc_feature 1..223: note = Description of Artificial Sequence: Synthetic polynucleotide
  source 1..223: mol_type = other DNA

SEQ ID NO: 16159 - DNA, 676 bp, synthetic construct; identical to SEQ ID NO: 15643
  misc_feature 1..676: note = Description of Artificial Sequence: Synthetic polynucleotide
  source 1..676: mol_type = other DNA

SEQ ID NO: 16160 - DNA, 1238 bp, synthetic construct; identical to SEQ ID NO: 15644
  misc_feature 1..1238: note = Description of Artificial Sequence: Synthetic polynucleotide
  source 1..1238: mol_type = other DNA

SEQ ID NO: 16161 - DNA, 220 bp, synthetic construct; identical to SEQ ID NO: 15645
  misc_feature 1..220: note = Description of Artificial Sequence: Synthetic polynucleotide
  source 1..220: mol_type = other DNA

SEQ ID NO: 16162 - DNA, 631 bp, synthetic construct; identical to SEQ ID NO: 15646
  misc_feature 1..631: note = Description of Artificial Sequence: Synthetic polynucleotide
  source 1..631: mol_type = other DNA

SEQ ID NO: 16163-16164 - skipped (2 entries)

SEQ ID NO: 16165 - DNA, 24 bp, Homo sapiens
  source 1..24: mol_type = unassigned DNA
cgaagcgcctcctgcgcagactcg

SEQ ID NO: 16166-16167 - skipped (2 entries)

SEQ ID NO: 16168 - DNA, 24 bp, Homo sapiens
  source 1..24: mol_type = unassigned DNA
cgagtctgcgcaggaggcgcttcg

SEQ ID NO: 16169-16170 - skipped (2 entries)

SEQ ID NO: 16171 - DNA, 24 bp, synthetic construct
  misc_feature 1..24: note = Description of Artificial Sequence: Synthetic oligonucleotide
  source 1..24: mol_type = other DNA
ygaagygttttttgygtagattyg

SEQ ID NO: 16172-16173 - skipped (2 entries)

SEQ ID NO: 16174 - DNA, 24 bp, synthetic construct
  misc_feature 1..24: note = Description of Artificial Sequence: Synthetic oligonucleotide
  source 1..24: mol_type = other DNA
tgaagtgttttttgtgtagatttg

SEQ ID NO: 16175-16176 - skipped (2 entries)

SEQ ID NO: 16177 - DNA, 24 bp, synthetic construct
  misc_feature 1..24: note = Description of Artificial Sequence: Synthetic oligonucleotide
  source 1..24: mol_type = other DNA
ygagtttgygtaggaggygtttyg

SEQ ID NO: 16178-16179 - skipped (2 entries)

SEQ ID NO: 16180 - DNA, 24 bp, synthetic construct
  misc_feature 1..24: note = Description of Artificial Sequence: Synthetic oligonucleotide
  source 1..24: mol_type = other DNA
tgagtttgtgtaggaggtgttttg

SEQ ID NO: 16181 - DNA, 201 bp, Homo sapiens; identical to SEQ ID NO: 14260
  source 1..201: mol_type = unassigned DNA

SEQ ID NO: 16182 - DNA, 204 bp, Homo sapiens; identical to SEQ ID NO: 14261
  source 1..204: mol_type = unassigned DNA

SEQ ID NO: 16183 - DNA, 223 bp, Homo sapiens; identical to SEQ ID NO: 14262
  source 1..223: mol_type = unassigned DNA

SEQ ID NO: 16184 - DNA, 201 bp, Homo sapiens; identical to SEQ ID NO: 14497
  source 1..201: mol_type = unassigned DNA

SEQ ID NO: 16185 - DNA, 204 bp, Homo sapiens; identical to SEQ ID NO: 14498
  source 1..204: mol_type = unassigned DNA

SEQ ID NO: 16186 - DNA, 223 bp, Homo sapiens; identical to SEQ ID NO: 14499
  source 1..223: mol_type = unassigned DNA

SEQ ID NO: 16187 - DNA, 201 bp, synthetic construct; identical to SEQ ID NO: 14734
  misc_feature 1..201: note = Description of Artificial Sequence: Synthetic polynucleotide
  source 1..201: mol_type = other DNA

SEQ ID NO: 16188 - DNA, 204 bp, synthetic construct; identical to SEQ ID NO: 14735
  misc_feature 1..204: note = Description of Artificial Sequence: Synthetic polynucleotide
  source 1..204: mol_type = other DNA

SEQ ID NO: 16189 - DNA, 223 bp, synthetic construct; identical to SEQ ID NO: 14736
  misc_feature 1..223: note = Description of Artificial Sequence: Synthetic polynucleotide
  source 1..223: mol_type = other DNA

SEQ ID NO: 16190 - DNA, 201 bp, synthetic construct; identical to SEQ ID NO: 14971
  misc_feature 1..201: note = Description of Artificial Sequence: Synthetic polynucleotide
  source 1..201: mol_type = other DNA

SEQ ID NO: 16191 - DNA, 204 bp, synthetic construct; identical to SEQ ID NO: 14972
  misc_feature 1..204: note = Description of Artificial Sequence: Synthetic polynucleotide
  source 1..204: mol_type = other DNA

SEQ ID NO: 16192 - DNA, 223 bp, synthetic construct; identical to SEQ ID NO: 14973
  misc_feature 1..223: note = Description of Artificial Sequence: Synthetic polynucleotide
  source 1..223: mol_type = other DNA

SEQ ID NO: 16193 - DNA, 201 bp, synthetic construct; identical to SEQ ID NO: 15208
  misc_feature 1..201: note = Description of Artificial Sequence: Synthetic polynucleotide
  source 1..201: mol_type = other DNA

SEQ ID NO: 16194 - DNA, 204 bp, synthetic construct; identical to SEQ ID NO: 15209
  misc_feature 1..204: note = Description of Artificial Sequence: Synthetic polynucleotide
  source 1..204: mol_type = other DNA

SEQ ID NO: 16195 - DNA, 223 bp, synthetic construct; identical to SEQ ID NO: 15210
  misc_feature 1..223: note = Description of Artificial Sequence: Synthetic polynucleotide
  source 1..223: mol_type = other DNA

SEQ ID NO: 16196 - DNA, 201 bp, synthetic construct; identical to SEQ ID NO: 15445
  misc_feature 1..201: note = Description of Artificial Sequence: Synthetic polynucleotide
  source 1..201: mol_type = other DNA

SEQ ID NO: 16197 - DNA, 204 bp, synthetic construct; identical to SEQ ID NO: 15446
  misc_feature 1..204: note = Description of Artificial Sequence: Synthetic polynucleotide
  source 1..204: mol_type = other DNA

SEQ ID NO: 16198 - DNA, 223 bp, synthetic construct; identical to SEQ ID NO: 15447
  misc_feature 1..223: note = Description of Artificial Sequence: Synthetic polynucleotide
  source 1..223: mol_type = other DNA

SEQ ID NO: 16199 - DNA, 631 bp, Homo sapiens; identical to SEQ ID NO: 15531
  source 1..631: mol_type = unassigned DNA

SEQ ID NO: 16200 - DNA, 631 bp, Homo sapiens; identical to SEQ ID NO: 15554
  source 1..631: mol_type = unassigned DNA

SEQ ID NO: 16201 - DNA, 631 bp, synthetic construct; identical to SEQ ID NO: 15577
  misc_feature 1..631: note = Description of Artificial Sequence: Synthetic polynucleotide
  source 1..631: mol_type = other DNA

SEQ ID NO: 16202 - DNA, 631 bp, synthetic construct; identical to SEQ ID NO: 15600
  misc_feature 1..631: note = Description of Artificial Sequence: Synthetic polynucleotide
  source 1..631: mol_type = other DNA

SEQ ID NO: 16203 - DNA, 631 bp, synthetic construct; identical to SEQ ID NO: 15623
  misc_feature 1..631: note = Description of Artificial Sequence: Synthetic polynucleotide
  source 1..631: mol_type = other DNA

SEQ ID NO: 16204 - DNA, 631 bp, synthetic construct; identical to SEQ ID NO: 15646
  misc_feature 1..631: note = Description of Artificial Sequence: Synthetic polynucleotide
  source 1..631: mol_type = other DNA
